(19) United States
(12) Patent Application Publication
(10) Pub. No.: US 2024/0263161 A1
(43) Pub. Date: Aug. 8, 2024

(54) PEPTIDES WITH MUCIN-BINDING PROPERTIES

(71) Applicant: University of Copenhagen, København (DK)

(72) Inventors: Yoshiki Narimatsu, København (DK); Christian BÜLL; Rebecca NASON, København (DK); Bernard Henrissat, København (DK); Henrik Clausen, København (DK)

(21) Appl. No.: 18/566,290

(22) PCT Filed: Jun. 3, 2022
(86) PCT No.: PCT/EP2022/065169

§ 371 Date: Dec. 1, 2023

(30) Foreign Application Priority Data
Jun. 4, 2021 (EP) 21177857.6

(51) Int. Cl. C12N 9/52; A61K 38/00; C07K 14/195

(52) U.S. Cl. CPC C12N 9/52; C07K 14/195; C12Y 304/24; A61K 38/00; C07K 2319/33

(57) ABSTRACT

There are provided compositions and mucin-binding targeting agents derived from microbial proteins that have selective binding properties for densely glycosylated mucins as well as such compositions and targeting agents comprising a binding moiety and/or a pay load which may be attached to the binding moiety or directly to a targeting agent. The compositions and targeting agents may be used as medicaments in the treatment of a disease, illness, or disorders.

### FIELD OF THE INVENTION

[0001] The present invention relates to mucin-binding targeting agents comprising peptides derived from microbial proteins that have selective binding properties for densely glycosylated mucins. Furthermore, the invention relates to use of such targeting agents to bind mucin layers covering mucosal surfaces such as gastric and colonic mucous and mucosal lining epithelia. The provided mucin-binding agents are useful for detecting and binding mucins and mucosal surfaces for biomarker and therapeutic purposes. The invention also relates to methods for the use of mucin-binding agents for targeting and delivery of therapeutic agents to mucosal surfaces.

### BACKGROUND OF THE INVENTION

### Mucins

[0002] Mucins are a large family of heavily glycosylated proteins that line all mucosal surfaces and represent the major macromolecules in body fluids¹. Mucins clear, contain, feed, direct, and continuously replenish our microbiomes, limiting unwanted co-habitation and repressing harmful pathogenic microorganisms². Mucins in the gut constitute the primary barrier as well as the ecological niche for the microbiome. Dynamic replenishment of mucin layers provides constant selection of the resident microbiome through adhesive interactions, and degradation of mucin O-glycans by members of the microbiota supply nutrients^{3,4,2,5}. Mucin O-glycans present the essential binding opportunities and informational cues for microorganisms via adhesins, however, our understanding of these features is essentially limited to results from studies with simple oligosaccharides without the protein context of mucins and the higher order features presented by dense O-glycan motifs. Mucins are notoriously difficult to isolate due to their size and heterogeneity, and production by recombinant expression in cell lines is impeded due to difficulties with the assembly of full coding expression constructs often resulting in heterogeneous products⁶.There are at least 18 distinct mucin genes encoding membrane or secreted mucins in the human genome⁷. The large gel-forming secreted mucins may form oligomeric networks or extended bundles through inter- and intramolecular disulfide bridges in the C- and N-terminal cysteine-rich regions¹. A common characteristic of all mucins is that the major part of their extracellular region is comprised of variable number of imperfect tandem repeated (TR) sequences that carry dense O-glycans, with the notable exception of MUC16 that contains a large, densely O-glycosylated N-terminal region without TRs^{8,9}. These TR regions appear poorly conserved throughout evolution in contrast to the flanking regions of the large mucins¹⁰, and this is generally interpreted to reflect that the TR regions simply need to carry dense O-glycans without specific patterns or functional consequences.

[0003] Mucins line all mucosal surfaces and represent one of the most abundant components of body fluids including saliva^{5,11}. Gel or polymer-forming secreted mucins (MUC2, MUC5AC, MUC5B, and MUC6) cover the gastrointestinal tract. In the stomach a net-like layer of MUC5AC polymers forms a diffusion barrier protecting the surface lining epithelium¹². In the small intestine a non-attached mucus layer exists, mainly comprised of MUC2. The large intestine, however, is covered by a thick two-layered MUC2 network with a dense inner layer that serves as a molecular sieve impenetrable by e.g. bacteria, and an outer loose MUC2 network that contains the microbiome at a distance from the surface epithelium. These mucin layers cover and protect the lining mucosa and present an obstacle for delivery of therapeutics through mucosal surfaces¹³.

[0004] Mucins arguably represent a last frontier in analytics of glycoproteins. Most mucins are extremely large and heterogenous glycoproteins that are resistant to conventional glycoproteomics strategies that are dependent on proteolytic fragmentation and sequencing¹⁴⁻¹⁶, and despite increasing knowledge of O-glycosites⁹, identification of actual sites of glycosylation in mucins is essentially limited to MUC1^{17,18,19}, lubricin²⁰, and the large N-terminal mucin-like region of MUC16⁹. Current understanding of mucins, their glycosylation, and their functions is therefore still highly limited.

### Glycomucinases—the Glycoprotease StcE

[0005] Secreted protease of C1 esterase inhibitor (StcE) from Enterohemorrhagic Escherichia coli (EHEC) O157:H7 is a zinc metalloprotease with remarkable ability for cleaving densely O-glycosylated mucins and mucin-like glycoproteins. StcE is thought to serve in colonic mucin degradation facilitating EHEC adherence to the epithelium and subsequent infection^{21,22}. Recent studies demonstrated that StcE has selective substrate specificity for S/T-X-S/T motifs with a requirement for O-glycans at the first S/T residue²³. The StcE glycoprotease was demonstrated to cleave a wide array of isolated mucins or cell-membrane mucins endogenously expressed by cancer cell lines, including cell surface mucins, such as MUC1 and MUC16, and mucin-like O-glycoproteins such as CD43 and CD45, revealing its broad substrate specificity with mucins and mucin-like glycoproteins²³.

[0006] Moreover, a catalytically inactive mutant of StcE (StcE^{E447D}) has glycan-binding properties for the dST core1 O-glycan as evaluated by printed glycan arrays²⁴, but also exhibit general binding properties for mucins^{23,25-27}. It has been proposed that StcE plays a role in adherence of EHEC to the intestinal epithelium by binding to mucins^{24,25,28}. More recently, Bertozzi and colleagues took advantage of a classical strategy to employ the catalytic unit of an enzyme for use as a binding molecule²⁹. This involves inactivating the catalytic function of the enzyme and retaining the substrate binding properties of the catalytic unit of the enzyme. Thus, the catalytically inactive mutant of StcE (StcE^{E447D}) was used for binding studies with tissue sections and binding to mucin secreting cells by use of histological tissue sections was demonstrated²⁷ [PCT/US2019/060346]. StcE has also been suggested to bind O-glycans on a glycan array and in particular to the core1 disialyl-T (dST) O-glycan²⁷. Moreover, a recent report described use of the StcE^{E447D} mutant for affinity isolation of O-glycoproteins demonstrating that the enzyme can be used to enrich mucins and a variety of other O-glycoproteins many of which are not mucins or mucin-like such as LRP8³⁰.

### Cell-based Glycan Arrays

[0007] State-of-the-art technologies to capture the informational content of mucins are confined to studies with synthetic and isolated O-glycans³¹, synthetic and chemoenzymatically produced short glycopeptides³², and synthetic glycopeptides as well as non-natural polymers^{33,34}; all of which are rare commodities that do not reflect the complex information captured in distinct human mucins by their display of patterns and structures of O-glycans. With the advent of the facile nuclease-based gene engineering technologies it has become possible to engineer mammalian cells with combinatorial knockout (KO) and knockin (KI) of glycosylation genes to display subsets and distinct features of the glycome on the cell surface or on secreted reporter proteins in order to probe biological interactions dependent on glycans³⁵⁻³⁷ [US patent applications US20210087587 and US20190330601]. The genetic engineering provides opportunities for interpretation and dissection of the glycosylation genes, biosynthetic pathways, and structural features required for identifiable interactions with the cell library³⁸. The cell-based glycan array is a sustainable platform to display the human glycome and enabling wide surveying of the informational content of human glycans. Use of the cell-based glycan display is fundamentally different from printed glycan arrays in that the primary read-out is consequences of loss/gain of glycosyltransferase genes that are used to predict structural glycan features. Printed glycan arrays provide direct information of glycan haptens involved in interactions, while the cell-based array provides comprehensive knowledge of genes regulating the expression of glycan features.

[0008] The cell-based glycan array strategy was previously used to express designed protein reporter constructs containing the high density O-glycan regions (O-glycodomains) derived from the stem region of GP1bα and TRs from several different mucins³⁶. The reporters were transiently expressed in HEK293^{WT} cells and used to demonstrate that bacterial adhesins from Streptococcus show differential binding to cells displaying different mucin reporters. These studies suggested that the adhesins recognize specific O-glycan structures in ways influenced by their presentation on the protein or mucin backbone. Analysis of the sequences used for the reporter constructs derived from the mucin TRs and GP1bα did not reveal simple common sequence motifs shared among those providing binding for the Siglec-like adhesins, and thus, the data could not be used to define the recognition motifs in further detail. Recognition of “clustered saccharide patches” orchestrated by positions, spacing and direct interactions of multiple glycans in a protein was earlier proposed to provide expanded binding specificities and high affinity interactions, and evidence in support of this has been found with all types of glycoconjugates^{39,40}.

[0009] Printed glycan arrays have transformed the field of glycosciences and served as essential tools for exploring the interactome of glycans and proteins⁴¹; however, studies have also resulted in the emergence of an interesting conundrum in explaining diversity of pathogen interactions and their host tropism in nature^{39,42}. Results from printed glycan arrays indicate that relatively few distinct glycan motifs serve as common ligands for many microbial adhesins and glycan-binding proteins⁴². The core structural motifs recognized, typically only 3-5 monosaccharides, are even more limited since glycans are built on common scaffolds with units such as N-Acetyllactosamine (LacNAc)^{42,43} Many host-pathogen interactions identified involve terminal sialic acid residues on common structural motifs, and while the glycosidic linkages, the underlying core structures, and numerous modifications of sialic acids⁴⁴, do vary to a degree, the overall structural permutations are still somewhat limited.

[0010] Current knowledge of the molecular basis for host-pathogen interactions are therefore incomplete, and essentially limited to binding and recognition of different simple oligosaccharide structures by lectins, adhesins, agglutinins and other carbohydrate-binding modules^{42,43}. Such oligosaccharides may be widely found on glycolipids, glycoproteins including mucins, proteoglycans, other types of glycoconjugates, and as free oligosaccharides found widely on cells and in body fluids throughout the body⁴⁵. Binding to such glycan epitopes by microbial glycan-binding molecules therefore have limited cell-type and organ specificity.

### SUMMARY OF THE INVENTION

[0011] The present invention relates to microbial peptide modules, that bind to select human and/or other mammalian mucins and do not bind to simple oligosaccharides. Microbial peptide modules of the invention bind to the tandem repeat regions of human mucins when these have clusters of O-glycans attached, as found on mucins in normal and diseased mucosa. The present invention also relates to methods of use of such microbial peptide modules in mucin-binding targeting agents for binding to mucins found in the mucous layers of human lining epithelia. Moreover, the present invention provides the use of such binding modules to detect mucins and mucous layers, and use of these modules to deliver pharmacological agents to mucosal surfaces.

[0012] The mucin-binding targeting agents present several advantages, including high selectivity for preferred mucins, such as MUC5Ac, and preference for binding non-truncated sugars over truncated sugars. Moreover, the mucin-binding targeting agents bind selected mucins with high affinity, such as in the nanomolar range.

[0013] The nanomolar range binding affinities of the mucin-binding targeting agents are improved markedly compared to other lectin-based systems (micromolar) and on par with binding affinities achieved by antibodies. Moreover, the high selectivity ensures that any attached payload can be delivered with high precision to the intended tissue expressing the targeted mucin(s), while the preference for non-truncated sugars limits off-target binding to truncated sugars, e.g. STn and Tn, which are associated with shed degraded mucins from the mucus.

### BRIEF DESCRIPTION OF THE DRAWINGS

[0014] FIG. 1 Illustrates design of the human mucin tandem repeat (TR) display platform. Illustration of the mucin TR display approach with membrane bound and secreted mucin reporters expressed in KO/KI glycoengineered isogenic HEK293 cell lines. HEK293 wild type (WT) cells are predicted to produce a mixture of mSTa, dST and sialylated core2 structures, and through stable genetic engineering a library of isogenic HEK293 cells with different O-glycosylation capacities were developed. These cells enable display of mucin TRs with different O-glycan structures as indicated (glycan symbols and genetic design shown) as well as tunable site occupancy by engineering of the GALNT isoenzyme gene repertoire (left part). The secreted mucin reporter construct design contains an N-terminal 6xHis and FLAG tag and GFP followed by different mucin TR domains of ca. 200 amino acids (single TR domains used for MUC3, MUC5B, MUC13, MUC6 and GP1bα) and a second C-terminal 6xHis tag. The membrane bound mucin reporter constructs contains a N-terminal FLAG tag and GFP followed by the mucin TR domain and further includes the SEA and transmembrane domain of human MUC1 in the C-terminal for membrane retention. The most characteristic TR sequence for each construct is illustrated with the number of TRs included (right part). Full sequences and glycosylation patterns of the TRs are shown in FIG. 2 and recited in Table 1. Transient or stable expression of the mucin TR reporters in the glycoengineered isogenic HEK293 cell library enables display of cell surface mucin TRs as well as production of secreted mucin TRs with distinct O-glycan structures. Structures of glycans are shown with symbols drawn according to the Symbol Nomenclature for Glycans (SNFG) format^{46.} Note that colors are omitted, but illustrated HexNAc, Hex, and sialic acid represent GalNAc, Gal and NeuAc.

[0015] FIG. 2 represents a schematic presentation of the imperfect TR amino acid sequences selected for design of the human mucin TR reporters. All Ser/Thr residues are highlighted as potential O-glycosites by glycan symbols (mSTa O-glycans shown for simplicity) to illustrate the characteristic patterning generated with all Ser/Thr residues O-glycosylated. The representation is to highlight the spacing of glycans on the TR sequence, and the actual sequences used for each of the human mucin TR constructs shown are found in Table 1.

[0016] FIG. 3 illustrates analysis of O-glycosylation of the mucin TR reporters expressed in glycoengineered HEK293 cells with antibodies and lectins. Panel a Flow cytometry analysis of binding of lectins and anti-carbohydrate mAbs to engineered HEK293 cells transiently expressing membrane-bound mucin TR reporters (GFP and FLAG-tagged) as indicated. Primary specificities illustrated with glycan symbols. GFP negative cells (non-transfected) or GFP positive cells (transfected) were analyzed by flow cytometry and mean fluorescent intensity (MFI) values presented as a heat map. Surface expression of mucin TR reporters was confirmed by anti-FLAG antibody labelling. Panel b Flow cytometry analysis of binding of mucin-specific mAbs to HEK293WT and HEK293KO C1GALT1 cells transiently expressing mucin TR reporters. Panel c Flow cytometry analysis of binding of MUC1 glycoform-specific mAbs to glycoengineered HEK293 cells stably expressing the MUC1 TR reporter. MFI values from representative experiments are shown (greytones indicate high to low MFI values).

[0017] FIG. 4 Illustrates SDS-PAGE Coomassie analysis of purified secreted mucin TR reporters. Panel a Analysis of TR reporters expressed in HEK293WT with heterogeneous core1/2 O-glycans. Panel b Analysis of TR reporters expressed in HEK293KO C1GALT1 with homogenous Tn O-glycans.

[0018] FIG. 5 Shows ELISA analysis of purified secreted MUC1 and MUC7 TR reporters produced in glycoengineered HEK293 cells. Panel a SDS-PAGE analysis of MUC1 TR reporters (left) and corresponding ELISA antigen titrations with lectins and anti-carbohydrate mAbs (right) as indicated. Anti-Flag mAb was included to evaluate comparable coating efficiencies. Panel b The same analysis with MUC7 TR reporters. Samples loaded for SDS-PAGE analysis corresponded to symbol key (top-to low illustrated right) as follows: Lane 1 HEK293^{WT}, lane 2 HEK293^{KO GCNT1}, lane HEK293^{KO GCNT1/ST3GAL1/2}, lane 4 HEK293^{KO GCNT1/ST3GAL1/2 ST6GALNAC2,3,4}, lane 5 HEK293^{KO C1GALT1}, lane 6 HEK293^{KO COSMC KI ST6GALNAC}, lane 7 HEK293^{KO COSMC KI B3GNT6}. Structures of glycans are shown with symbols drawn according to the Symbol Nomenclature for Glycans (SNFG) format⁴⁴. Note that colors are omitted, but illustrated HexNAc (open/grey), Hex, and sialic acid represent GalNAc/GlcNAc, Gal and NeuAc.

[0019] FIG. 6 Illustrates HPLC isolation of the O-glycodomains from secreted MUC1 TR reporters for intact mass analysis. Panel a C4 HPLC isolation of the undigested Tn-glycosylated MUC1 TR reporter with GFP expressed in HEK293^{KO CIGALT1} cells. Panel b C8 HPLC separation of the corresponding LysC digested TR reporter with the O-glycodomain eluting in fractions 22-23 and the intact GFP module in fraction 33 as verified by VVA lectin ELISA. Panel c C4-HPLC of LysC digested T-MUC1 with the O-glycodomain eluting in fractions 22-26 and the intact GFP module in fraction 35 as verified by PNA lectin ELISA, and Panel d further digested by AspN. The intact GFP-tagged reporter eluted at ˜60% acetonitrile, while the released TR O-glycodomains eluted at ˜35% and the digested GFP-tag at ˜55%.

[0020] FIG. 7 Illustrates mass spectrometry analysis of secreted MUC1 TR reporter O-glycoforms. Panel a Deconvoluted intact mass spectra of secreted, purified the MUC1 reporter produced in HEK293^{KO C1GALT1}, HEK293^{KI ST6GALNAC1}, HEK293^{KO GCNT1, ST3GAL1/2} and HEK293^{KO GCNT1} cells. Reporters were treated with neuraminidase to remove sialic acids and reduce complexity, and digested by Lys-C followed by HPLC C4 isolation yielding the 157 amino acid MUC1 TR O-glycodomain fragment. All MUC1 O-glycoforms (Tn and T) showed a rather homogeneous mass comprising 32-35 HexNAc/HexHexNAc residues, and with 33 or 34 HexNAc/HexHexNAc being the most abundant peak. Panel b Site-specific O-glycopeptide LC-MS/MS analysis of MUC1 reporters after AspN digestion. Panel c MALDI-TOF profiling of released O-glycans. Structures of glycans are shown with symbols drawn according to the Symbol Nomenclature for Glycans (SNFG) format44. Note that colors are omitted, but illustrated HexNAc (open/grey), Hex, and sialic acid represent GalNAc/GlcNAc, Gal and NeuAc.

[0021] FIG. 8 Illustrates intact mass spectra of secreted mucin TR reporters, of which are classified as mucins (MUC2TR1, MUC2TR2mucinTR reporters designed from secreted mucins (MUC2TR#1, MUC2TR2MUC2#2, MUC5AC and MUC7) and classified as membrane-bound mucins (MUC13 and MUC21) produced in HEK293^{KO CIGALT1} (Tn).

[0022] FIG. 9 Shows that the glycoprotease StcE cleaves selective mucin TRs and O-glycoforms. Panel a Graphic depiction of the assay designs for enzyme assays with isolated and cell membrane bound mucin TR reporters. Panel b SDS-PAGE analysis of StcE digestion (dose titration) of isolated MUC2#1 (upper panel) and MUC5AC (lower panel) reporters produced in glycoengineered HEK293 cells (core2, Tn and STn O-glycoforms). Purified reporters (0.5 μg) were incubated for 2 h at 37° C., and gels visualized with Krypton fluorescent protein stain. Representative gels of three independent experiments are shown. Panel c Flow cytometry analysis of StcE cleavage of different TR reporters expressed stably as membrane bound proteins on the surface of HEK293^{WT} cells and detected by anti-FLAG antibody binding. Bar diagram shows average mean fluorescent intensities (MFI)±SEM. An artificially designed TR reporter with a single O-glycosite was used to serve as a control (ctrl) for the clusters and patterns of O-glycans found in human mucin TRs. Data from three independent experiments are shown. Panel d Flow cytometry analysis of StcE cleavage (dose titration) of MUC2#1 and MUC5AC membrane reporters stably expressed on glycoengineered HEK293 cells (core2, dST, mSTa, T, Tn, core3 and STn glycoforms). Note that core3 is represented as the core disaccharide (GlcNAcβ1-3GalNAcα1-O-Ser/Thr), but this is likely galactosylated and sialylated. Data are presented as average MFI±SEM of three independent experiments. Structures of glycans are shown with symbols drawn according to the Symbol Nomenclature for Glycans (SNFG) format⁴⁴. Note that colors are omitted, but illustrated HexNAc (open/grey), Hex, and sialic acid represent GalNAc/GlcNAc, Gal and NeuAc.

[0023] FIG. 10 Illustrates analysis of StcE activity with isolated secreted and cell membrane-bound mucin TR reporters. Panel a SDS-PAGE analysis of StcE (dose titration) digestion of secreted purified MUC7 TR reporters with different glycoforms. Panel b SDS-PAGE analysis of StcE digestion of MUC1 TR reporters with 1:10 ratio enzyme to substrate of core2 and Tn glycoforms. Panel c Flow cytometry analysis of membrane bound reporters illustrating the gating strategy for transiently expressed GFP-tagged mucin TR reporters in HEK293 cells. Gating for GFP positive cells correlates well with the population of cells labelled by the anti-FLAG mAb detecting surface located mucin TR reporters. Panel d Representative histograms of membrane MUC2#1, MUC5AC, MUC7 and MUC1 TR reporters expressed in HEK293WT cells by increasing concentrations of StcE as determined by staining with anti-FLAG mAb. Panel e Representative histograms show StcE-mediated cleavage of MUC2#1, MUC5AC, MUC7 and MUC1 TR reporters expressed by HEK293 cells with core2, diST, mSTa, T, Tn, core3 or STn glycosylation. Mock transfected cells and transfected, untreated cells are shown as control.

[0024] FIG. 11 Illustrates that the mucin binding properties of StcE is mediated by the X409 domain. Panel a Graphic depiction of the design of enzyme activity and binding assays performed. Panel b Schematic representation of expression constructs for full coding StcE^{WT}, StcE^{E447D}, X409 domain truncated StcE (StcE^{ΔX409}), and the isolated X409 domains±GFP (left). Flow cytometry analysis of cleavage (dose titration) of membrane bound MUC2#1 expressed in HEK293^{WT} cells by StcE^{WT}, StcE^{E447D}, Stc^{EΔΔX409}, and the X409 domain detected by anti-FLAG staining and flow cytometry (right). Representative data of three independent experiments with similar results are shown. Panel c Immunofluorescence staining of representative sections of normal colon stained with StcE, StcE^{E447D}, Stc^{EΔX409}, X409, and anti-MUC2 mAb (PMH1). Counterstained with DAPI (blue). Panel d Flow cytometry analysis of X409-GFP binding to HEK293WT cells stably expressing mucin TR reporters tagged with CFP (instead of GFP).

[0025] Average MFI±SEM values from three independent experiments are shown. Panel e Flow cytometry analysis of X409-GFP binding (1 μg/ml) to MUC2#1, MUC5AC, MUC7 and MUC1 reporters expressed on glycoengineered HEK293 cells (core2, diST, mSTa, T, Tn, core3, and STn). Structures of glycans are shown with symbols drawn according to the Symbol Nomenclature for Glycans (SNFG) format44. Note that colors are omitted but illustrated HexNAc (open/grey), Hex, and sialic acid represent GalNAc/GlcNAc, Gal and NeuAc.

[0026] FIG. 12 Illustrates that the StcE X409 domain binds mucins in situ. Panel a SDS-PAGE analysis of StcE and StcEΔX409 digestion (time course 1:200 ratio) of the MUC2#1 TR reporter expressed in HEK293WT. Panel b Representative fluorescence images of sections from normal colon (pretreated with neuraminidase) reacted with X409-GFP and anti-Tn-MUC2 (PMH1) mAb. Panel c Images of normal and neoplastic tissue microarray sections reacted with X409-GFP. Fluorescence is shown as white/light grey.

[0027] FIG. 13 Illustrates ELISA analysis of X409 binding to animal mucins (PSM, BSM, OSM) and select human mucin TRs. ELISA analysis with purified, secreted mucin reporters derived from the cell-based mucin display platform showing selective binding of X409 to purified porcine submaxillary mucin (PSM), Tn MUC5AC and Tn MUC21. No binding was observed for purified ovine submaxillary gland mucin (OSM/AOSM), bovine submaxillary mucin (BSM) and Tn/STn MUC1 (right).

[0028] FIG. 14 Illustrates the 3-D structure of StcE (PDB 3UJZ) and StcE protein sequence. Panel a The catalytic domain is shown (top) with the catalytic zinc shown (small circle). The X409 distinct module is shown in opposite the catalytic domain (bottom). Panel b Illustrates the amino acid sequence of Escherichia coli O157:H7 StcE with the signal peptide (not underlined), the catalytic domain (underlined), and the X409 module (underlined 2×). Panel c shows the nucleic acid sequence of Escherichia coli O157:H7 StcE with translation into amino acid sequence

[0029] FIG. 15 illustrates a phylogenic tree of the genes identified with related X409 binding modules including accession numbers and strain origin. The X409 module sequence of Escherichia coli O157:H7 StcE exhibits between 100% and 65% amino acid sequence identity to related modules found in Zn-metalloproteases with Pfam10462 domains. The X409 module sequence of Escherichia coli O157:H7 StcE exhibits 35-100% amino acid sequence identity with X409 modules found in other bacteria.

[0030] FIG. 16 Illustrates the natural sequence variation of the X409 binding module in different bacteria. Multiple sequence alignment of a sampling of over 60 sequences of related X409 binding modules with high conservation are shown with GenBank accession numbers and bacterial strain origin. Multiple sequence alignments were computed using Muscle⁴⁶ using default parameters. Rendering of the multiple alignment was done using ESPRIPT⁴⁷. The alignment is shown in FIGS. 16-1/2. The alignment shows that residue 3 (Cys/C) is the first fully conserved residue of the X409 sequence, and residue 96 (Val/V) is the last fully conserved, strongly suggesting that these residues confine the minimum binding module of X409. Residues 1-2 (Glu-Gly/EG) are semi-conserved among the 60 sequences and thus may contribute to the properties of X409. Similarly, residue 97 (Val/V) is semi-conserved, while residues 98-99 (Tyr-Lys/YK) are less conserved.

[0031] FIG. 17 Illustrates 456 amino acid sequences of X409 related protein modules with protein sequence accession and domain limits for each. StcE is indicated and a consensus sequence for all sequences is shown. The residues conserved across the multiple alignment are important for the fold and the binding function of these X409 related binding modules. The Figure includes five consecutive Figures split into two. Multiple sequence alignments were computed using Muscle46 using default parameters. Rendering of the multiple alignment was done using ESPRIPT⁴⁷. The alignment shows the same pattern of conserved X409 residues 1-3 and 96-97.

[0032] FIG. 18 illustrates the novel mucin-binding module designated HC1 CBM51 found in Clostridium perfringens LLY_N11 (GenBank accession number ATD49073.1), a sequence unrelated to the X409 mucin-binding module. Panel a The novel mucin-binding module is derived from the Clostridium perfringens gene accession no. ATD49073.1. Schematic representation of the expression construct for the coding protein is shown with the full coding sequence where the sequence of the CBM51 module is underlined. Panel b Fluorescence immunohistology shows selective binding of the CBM51 module to stomach mucin-producing cells and no binding to cells in colon sections. Panel c shows flow cytometry analysis of the CBM51 module to HEK293WT cells transiently expressing mucin TR reporters as indicated.

[0033] FIG. 19 illustrates the novel mucin-binding module designated HC7 X408-FN3-CBM5 found in Bacillus cereus K8 (GenBank accession number ASJ51756.1), a sequence unrelated to the X409 mucin-binding module. Panel a The novel mucin-binding module is derived from the Bacillus cereus K8 (Gene Bank accession number ASJ51756.1). Schematic representation of the expression construct for the full length protein is shown with the full coding sequence where the sequence of the X408-FN3-CBM5 module is underlined. Panel b Fluorescence immunohistology shows selective binding of the X408-FN3-CBM5 module to stomach mucin-producing cells and no binding to cells in colon sections. Panel c shows flow cytometry analysis of the X408-FN3-CBM5 module to HEK293WT cells transiently expressing mucin TR reporters as indicated.

[0034] FIG. 20 illustrates the novel mucin-binding module designated HC11 Bacon-Bacon-CBM32 from Bacteroides fragilis (GenBank accession number ASJ51756.1), a sequence unrelated to the X409 mucin-binding module. Panel a The novel mucin-binding module is derived from Bacteroides fragilis (GenBank accession number ASJ51756.1). Schematic representation of the expression construct for the full coding protein is shown with the full coding sequence where the sequence of the Bacon-Bacon-CBM32 module is underlined. Panel b Fluorescence immunohistology shows selective binding of the Bacon-Bacon-CBM32 module to stomach mucin-producing cells and no binding to cells in colon sections. Panel c shows flow cytometry analysis of the Bacon-Bacon-CBM32 module to HEK293WT cells transiently expressing mucin TR reporters as indicated.

[0035] FIG. 21 illustrates the novel mucin-binding module designated HC12 Bacteroides thetaiotaomicron (GenBank AAO79349 or WP_008764444), a sequence unrelated to the X409 mucin-binding module. Panel a The novel mucin-binding module is derived from Bacteroides thetaiotaomicron (GenBank AAO79349 or WP_008764444). Schematic representation of the expression construct for the full coding protein is shown with the full coding sequence where the sequence of the Bacon-CBM32 module is underlined. Panel b Fluorescence immunohistology shows selective binding of the Bacon-CBM32 module to stomach mucin-producing cells as well as cells in colon sections. Panel c shows flow cytometry analysis of the Bacon-CBM32 module to HEK293WT cells transiently expressing mucin TR reporters as indicated.

[0036] FIG. 22 illustrates determination of binding affinities of X409 towards mucin TRs and glycoforms by microscale thermophoresis (MST) assay. Panel a Schematic representation of MST assay with AlexaFluoro647 labelled MBP-X409. Panel b MST spectrum data with data fitting curve for different MUC5AC TR reporter and glycoforms as indicated. Tn; GalNAcα1-O-Ser/Thr, WT; wild type core2 sialylated O-glycans as produced in WT HEK293 cells. Panel c Calculated dissociation constants from Panel b. Two constants indicate biphasic binding states.

[0037] FIG. 23 illustrates binding properties of four representative X409 variant sequences from FIG. 16/17 by flow cytometry analysis. Panel a shows binding of X409 (E. coli 0157) and four related X409 modules from Vibrio anaquillarum (Gene Bank accession number AZS25716), Aeromonas hydrophilia(accession number QBX76946), Shewanella baltica OS223 (accession number ACK48812), and E. coli (AUM10835) towards MUC5Ac expressed on glycoengineered HEK293 cells with different O-glycans. E. coli (AUM10835) exhibits narrower glycan specificity without binding to In and STn glycoforms. Panel b shows binding of the same X409 modules to HEK293 core1 cells (expressing T O-glycans) transiently expressing 8 different mucin TR reporters as indicated.

[0038] FIG. 24 illustrates analysis binding properties of novel mucin-binding modules to different glycoforms of 12 human mucin TRs by flow cytometry. HC1 (CBM51 derived from Clostridium perfringens LLY_N11, access number ATD49073.1, see FIG. 18) binds all mucins with complex O-glycans but not Tn compared to X409 (StcE control).

[0039] FIG. 25 illustrates analysis binding properties of X409 mucin-binding modules from StcE to different glycoforms of 12 human mucin TRs by flow cytometry. HC7 (X408/FN3/CBM5 from Bacillus cereus K8, access number ASJ51756.1, see FIG. 19) binds selective mucins and complex O-glycans with improved selectivity compared to X409 (StcE control).

[0040] FIG. 26 illustrates analysis binding properties of X409 mucin-binding modules from StcE to different glycoforms of 12 human mucin TRs by flow cytometry. HC11 (2×Bacon/CBM32 from Bacteroides fragilis, access number QCT79445.1, see FIG. 20) binds mucins selectively with core1 T O-glycans but not Tn compared to X409 (StcE control).

[0041] FIG. 27 illustrates analysis binding properties of X409 mucin-binding modules from StcE to different glycoforms of 12 human mucin TRs by flow cytometry. HC12 (Bacon/CBM32 from Bacteroides thetaiotaomicron, access number AAO79349 or WP_008764444, see FIG. 21) binds mucins selectively with Tn O-glycans but not core1 O-glycans compared to X409 (StcE control).

[0042] FIG. 28 illustrates analysis binding properties of X409 mucin-binding modules from StcE to different glycoforms of 12 human mucin TRs by flow cytometry. HC5 (from Pedobacter steynii DX4, access number AOM76365.1) binds mucins selectively with Tn O-glycans but not core1 O-glycans compared to X409 (StcE control).

### DETAILED DESCRIPTION

[0043] It is an object of the present invention to provide novel mucin-binding peptides that exhibit select binding properties for mucins and O-glycodomains in glycoproteins and to provide mucin-binding targeting agents comprising such peptides.

[0044] It is an object of the present invention to provide novel mucin-binding peptides that exhibit select binding properties for mucins and mucin tandem repeat regions, which binding is not dependent on the structures of O-glycans attached to these.

[0045] It is an object of the present invention to provide novel mucin-binding peptides that exhibit select binding properties for mucins and mucin tandem repeat regions which binding is independent on the structures of the O-glycans attached to these mucins.

[0046] An object of the present invention relates to the mucin-binding properties of the X409 peptide module and related sequences and use of these to bind mucins for diagnosis of disease.

[0047] An object of the present invention relates to the mucin-binding properties of the X409 peptide module and related sequences and use of these to bind mucins for therapeutic purposes.

[0048] An object of the present invention relates to the mucin-binding properties of the X409 peptide module and related sequences and use of these for delivery of pharmacological agents to mucosal surfaces.

[0049] An object of the present invention relates to methods of using the X409 peptide module and other peptides and peptide modules to obtain mucin-binding properties for pharmaceutical formulations.

[0050] The present invention relates to a peptide or peptide module (designated X409) found in the Secreted Protease of C1 Esterase Inhibitor (StcE) bacterial protease and other bacterial proteins and peptide modules that have select mucin-binding properties.

[0051] It is an object of the present invention to provide related X409 binding modules with high sequence similarity within bacteria.

[0052] It is an object of the present invention to provide related X409 binding modules with lower sequence similarity within bacteria, such as 65% sequence identity or more, e.g. such as such as 70% or more, such as 80% or more, such as 85% or more, such as 90 percent or more, such as 95% or more, such as 96% or more, such as 97% or more, such as 98% or more, such 99% or more, such as 99.5% or more thereto.

[0053] The present invention provides solutions to the objects above.

[0054] The present invention provides the unique binding specificity of a small peptide module X409 with highly select binding to mucins with clusters of O-glycans attached.

[0055] The present invention provides the unique binding specificity of the small peptide module X409 with binding to mucins with clusters of O-glycans and with binding to such mucins with different types of O-glycan structures attached.

[0056] The present invention provides multiple X409-related mucin-binding peptide and peptide modules, and mucin-binding peptides and peptide modules that are not related to X409.

[0057] The present invention provides small peptide sequence modules with binding to select mucin tandem repeat regions and containing clusters of different types of O-glycans.

[0058] It is contemplated that mucin-binding targeting agents are for use in a mammal such as e.g. a human.

[0059] The mucin-binding targeting agents may be used as a medicament in a human or on an animal, such as in veterinary care or animal health.

### Definitions

[0060] The mucin-binding modules or polypeptides of the invention bind to densely O-glycosylated mucins and mucin-like glycoproteins, i.e. to clusters of O-glycans with 2,3,4,5,6,7, or 8 consecutive O-glycans attached to adjacent Ser/Thr residues often arranged in multiple consecutive patterns.

[0061] The term “isolated” as used herein in relation to peptides refers to amino acid sequences which have been taken out of their native environment. Thus, an isolated peptide is a non-native peptide which may be a part (or sub-sequence) of a larger peptide or protein. Isolated peptides are identified and selected based on their affinity for preferred mucins and used in mucin-binding targeting agents, which can be chimeric construct that may comprise also a payload. The chimeric constructs forming the mucin-binding targeting agents may be produced by recombinant expression in a host cell, such as a bacteria.

[0062] The term “binding affinity” is used herein to describe the strength of interaction between to binding partners, such as the mucin-binding targeting agent (or the isolated peptide) and a mucin, such as MUC5AC or MUC1. The binding affinity may be quantified by determination of the dissociation constant of said interaction. A low dissociation constant indicates a strong interaction (or binding).

[0063] The term payload as used herein refers to a moiety that is intended to be delivered to a tissue by the binding of a mucin-binding targeting agent as provided herein. The payload is thus attached to said mucin-binding targeting agent by a binding moiety.

[0064] The binding moiety may be e.g. a peptide linker, an ester, a lipid anchor, avidin, streptavidin, biotin, or another binding moiety such as an antibody, or a nanobody.

[0065] The binding moiety may be able to undergo in vivo acid hydrolysis or may comprise a protease site that can undergo cleavage to ensure the mucin-binding-domain is not delivered e.g. with a bioactive peptide to be taken up systematically.

[0066] The term payload may refer to an entire complex, such as a nanoparticle, liposome, vesicle, which contains a bioactive compound to be delivered or it may refer to a bioactive compound, stain, or e.g. a detectable marker. It is contemplated that when the payload is a liposome or another vesicle it may be attached to the mucin-binding targeting agent by a binding moiety in the form of a lipid anchor, or by a different moiety inserted into the liposome or vesicle. In the latter case the moiety is then bound or attached to mucin-binding targeting agent via the binding moiety.

[0067] When the payload is a liposome a bioactive peptide or protein, oligonucleotide, or other therapeutic agents such as a therapeutic peptide may be inside the liposome.

[0068] Therapeutic peptides may also be attached to the binding moiety, or may form chimeric proteins with the mucin-binding targeting agent, in which the binding moiety may be a peptide bond or a peptide linker.

[0069] Therapeutic peptides and proteins for use in or as payload may be selected from the group comprising:

[0070] Neuroendocrine protein 7B2, Acyl-CoA-binding domain-containing protein, Adrenomedullin, Proadrenomedullin NApelin-13 , Apelin, Gastrin-releasing peptide, Neuromedin-C, Neuromedin-B, Bradykinin, T-kinin, Calcitonin, Katacalcin, Calcitonin gene-related peptide 1, Calcitonin gene-related peptide 2, Islet amyloid polypeptide, CART Cocaine- and amphetamine-regulated, Cerebellin -4, Cerebellin-1, Cerebellin-2, Cerebellin-3, AL-11, Chromogranin-A, EA-92, ER-37, ES-43, GR-44, GV-19, LF-19, Pancreastatin, SS-18, Vasostatin, WA-8, WE-14, CCB peptide, GAWK peptide, Secretogranin, Secretoneurin, Kininogen, Big endothelin-1, Endothelin, Neuropeptide AF, Neuropeptide FF, Neuropeptide SF, Neuropeptide NPSF, Neuropeptide NPVF, Neuropeptide RFRP Prolactin-releasing peptide, Galanin, Galanin message-associated peptide, Galanin-like peptide, Cholecystokinin, Big gastrin, Gastrin, Gastric inhibitory polypeptide, Glicentin, Glicentin-related polypeptide, Glucagon, Glucagon-like peptide 1, Glucagon-like peptide 2, Oxyntomodulin, PACAP-related peptide, Pituitary adenylate cyclase-activating peptide 27, Pituitary adenylate cyclase-activating peptide 38, Secretin, Somatoliberin, Intestinal peptide PHM-27, Intestinal peptide PHV-42, Vasoactive intestinal peptide, GnRH-associated peptide 1, Gonadoliberin-1, Progonadoliberin-1, GnRH-associated peptide 2, Gonadoliberin-2, Progonadoliberin-2, Insulin-like growth factor I, Insulin-like growth factor Il, Preptin, Insulin A chain, Insulin B chain, Relaxin A chain, Relaxin B chain , Relaxin A chain, Relaxin B chain, Relaxin-3 A chain, Relaxin-3 B chain , Kisspeptin-10, Kisspeptin-13, Kisspeptin-14, Metastasis-suppressor KiSS-1, Metastin, Leptin, Melanin-concentrating hormone, Neuropeptide-glutamic acid-isoleucine, Neuropeptide-glycine-glutamic acid, Pro-MCH, Ghrelins, Obestatin, Motilin, Motilin-associated peptide, Promotilin, Adiponectin, Ubiquitin-like protein 5, Agouti-related protein, Nicotinamide phosphoribosyltransferase, Atrial natriuretic peptide ANP, Cardiodilatin-related peptide, Brain natriuretic peptide BNP , Cardiac natriuretic peptide CNP, Neurexophilin-1, Neurexophilin-2, Neurexophilin-3, Neurexophilin-4, Neuromedin-S, Neuromedin-U-25, Neuropeptide B-23, Neuropeptide B-29, Neuropeptide W-23, Neuropeptide W-30, Neuropeptide S, Large neuromedin N, Neuromedin N, Neurotensin, Tail peptide, C-flanking peptide of NPY, Neuropeptide Y, Pancreatic hormone, Pancreatic icosapeptide, Peptide YY, Nucleobindin-1, Nesfatin-1, Nucleobindin-2, Deltorphin I, Gamma-Lipotropin, γ-melanocyte-stimulating hormone, Alpha-neoendorphin, Beta-neoendorphin, Big dynorphin, Dynorphin A, Leu-enkephalin, Leumorphin, Rimorphin, Met-enkephalin, PENK, Synenkephalin, Neuropeptide 1, Neuropeptide 2, Nociceptin, Orexin-A, Orexin-B, Tuberoinfundibular peptide, Osteostatin, Parathyroid hormone-related protein, PTHrP, Beta-endorphin, Corticotropin, Corticotropin-like intermediary peptide, Lipotropin beta, Lipotropin gamma, Melanotropin alpha, Melanotropin beta, Melanotropin gamma, NPP, ProSAAS, Big LEN, Big PEN-LEN, Big SAAS KEP, Little LEN, Little SAAS, PEN, Resistin, Resistin-like beta, QRF-amide, Corticoliberin, Urocortin, Urocortin-2, Urocortin-3, Corticosteroid-binding globulin, Serpin, Angiotensin, Angiotensinogen, Cortistatin, Somatostatin, Prolactin, Substance P, C-terminal-flanking peptide, Neurokinin A, Neuropeptide K, Substance P, Neurokinin-B, Pro-thyrotropin-releasing hormone, Thyrotropin-releasing hormone, Urotensin, Neurophysin 1, Oxytocin, Arg-vasopressin, Copeptin, Neurophysin 2, Antimicrobial peptide VGF, Neuroendocrine regulatory peptide-1, Neuroendocrine regulatory peptide-2, Neurosecretory protein VGF.

[0071] The payload may be in the form of a peptide or protein or a part of a protein. The mucin-binding targeting agent and the payload form a chimeric protein. In such cases the binding moiety will be understood to be e.g. a peptide bond. Such protein or peptide payloads may be therapeutic peptides. It is also contemplated that the payload may be a receptor, a toxin, or a lectin-binding protein.

[0072] The payload may also be an enzyme, in which case the mucin-binding targeting agent may facilitate retention of the enzyme at the site of action, e.g. in the pancreas or the gut. This mode of action may be used for improving efficacy of the enzymes. Thus, enzymes include, but are not limited to, therapeutic and/or digestive enzymes. In particular, digestive enzymes targeted to the pancreas may be utilized for treatment of patients having their pancreas surgically removed. Enzymes targeted to the gut can improve feed digestion and nutrient uptake as the mucin-binding targeting agent ensures prolonged retention in the gut via specific binding to site-specific mucins carrying non-truncated sugars. The payload is not limited to any particular enzyme but may be any type of enzyme, including, but not limited to, proteases, lipases, phytases, amylase, xylanases, β-Glucanases, α-Galactosidases, mannanases, cellulases, hemicellulases, and pectinases.

[0073] It is to be understood that the mucin-binding targeting agent may be part of a fusion protein. Such fusion proteins may comprise a therapeutic agent, such as a drug, a therapeutic protein or a bioactive peptide. Fusion proteins protein can in this manner be utilized as delivery vehicles with enhanced retention at the targeted tissue, such as the nasal tissue, the pancreas or the gut.

[0074] The payload can also be a vaccine. By combining a vaccine with the mucin-binding targeting agent, the vaccine may be efficiently delivered to the mucosa. It is contemplated that delivery to the mucosa will improve the immunological protection provided by the vaccine. Without being bound by theory, herein is suggested that immunological protection can be enhanced by presentation through the mucosa to stimulate the mucosal IgA immunity.

[0075] Thus, an embodiment of the present invention relates to the mucin-binding targeting agent, wherein the payload is a vaccine, such as a viral vaccine. Accordingly, the payload may comprise one or more antigens. According, an embodiment of the present invention relates to the mucin-binding targeting agent, wherein the payload comprises one or more antigens selected from the group consisting of proteins, peptides, polypeptides or nucleic acids. In particular, the nucleic acids may be DNA or RNA, and analogues thereof. The proteins may in some variants of the payload be a glycoprotein or a polysaccharide.

[0076] A further embodiment of the present invention relates to the mucin-binding targeting agent, wherein the one or more antigens are virus-specific antigens. Yet another embodiment of the present invention relates to the mucin-binding targeting agent, wherein the virus-specific antigen originates from a virus selected from the group consisting of SARS-COV-2 virus, SARS-COV-1 virus, Corona virus, Adenovirus, Norovirus, Papillomavirus, Polyomavirus, Herpes simplex virus (HSV), Alpha herpesvirinae human herpesvirus 1, 2, 3, Human gamma herpesvirus 4, 8 (Kaposi sarcoma), Betaherpesvirinae 5, 6, 7, Varicella zoster virus (VZV), Epstein-Barr virus (EBV), Cytomegalovirus (CMV), Picornavirus, Enterovirus, Rhinovirus, Hepatovirus, Cardiovirus, Aphthovirus, Coxsackie virus, Echovirus, Paramyxovirus, Measles virus, Parainfluenza virus, Mumps virus, Respiratory syncytial virus (RSV), Metapneumovirus, Nipah virus, Hendra viruses, Orthomyxoviruses, Influenza virus, Rhabdovirus, Filovirus, Marburg virus, Ebola virus, Bornavirus, Rabies virus, Reovirus, Rotavirus, Coltivirus, Orbivirus, Norwalk virus, Calicivirus, Rubella virus, Togavirus, Flavivirus, Arbovirus, Bunyavirus, Arena virus, Poxvirus, Parvovirus, Retrovirus, Human immunodeficiency virus (HIV), Human-T cell leukemia virus, and Hepatitis A, B, C, D, G, and E viruses.

[0077] A still further embodiment of the present invention relates to the mucin-binding targeting agent, wherein the one or more antigens originates from SARS-COV-2 virus.

[0078] It is contemplated that the mucin-binding targeting agent or part thereof may be expressed recombinantly. Thus, fusion proteins comprising the mucin-binding targeting agent may be expressed recombinantly.

[0079] It is contemplated that the mucin-binding targeting agents of the invention are catalytically inactive against mucins, i.e. they lack glycomucinase activity.

[0080] The payload may also be a radionuclide or a radiopeptide. The payload may be a therapeutic agent for use in the treatment of a cancer. It is contemplated that cancers affect the expression of mucins and therefore compositions according to the present invention may be used to deliver therapeutic agents to a cancer tissue with abnormal mucin expression,

[0081] The payload may also be a stain or a detectable marker, such as a chromophore, fluorophore, or radionuclide, or other detectable markers. Examples of detectable markers include nanodots and nanoparticles such as colloidal gold, and fluorescent proteins such as GFP. Such payloads enable the use of mucin-binding targeting agents according to the present invention for use in vitro or in vivo for immunological, histological, and/or diagnostic purposes. It is contemplated that such use can be for detecting normal and abnormal mucin-expressing tissue and may therefore be used e.g. to discern healthy and/or diseased tissue, such as in cancers and/or neoplasia of mucin expressing tissue, e.g. in the colon, stomach, pancreas, mammary, fallopian tube or other epithelial tissue. It is contemplated that such use is also for cancers and/or neoplasia epithelial and non-epithelial tissue where mucin-expression is abnormal, e.g. where mucin expression is absent or low in the non-diseased state but where mucin is expressed in the diseased state.

[0082] Accordingly, an embodiment of the present invention relates to the mucin-binding targeting agent as described herein, wherein the payload is selected from the group consisting of a therapeutic agent, an enzyme, a vaccine, a peptide hormone, a small molecule drug, a detectable marker, nanoparticle, liposome, vesicle and a stain.

[0083] The mucin binding targeting agent may be used as a medicament, and may be comprised in a composition. Such a composition may further comprise a pharmaceutically acceptable excipient and/or a pharmaceutically acceptable carrier. The compositions may be combined with excipients or coatings to form drug delivery formulations. Drug delivery formulations may be in a form of suspensions, tablets, capsules, gels, suppositories. The formulations may be oral suspensions to induce a rapid effect in combination with prolonged release. The formulation may be packaged in an excipient such as an enteric coating or a shell. The formulation may also include other mucoadhesive materials to enhance retention within the gastrointestinal tract. Compositions according to the present invention may be for oral, rectal, vaginal, buccal, ocular, nasal, or inhalation administration.

[0084] The aforementioned compounds of the invention or a formulation thereof may be administered by any conventional method including oral, and parenteral (e.g., subcutaneous or intramuscular) injection. The treatment may consist of a single dose or a plurality of doses over a period of time.

[0085] Whilst it is possible for a compound of the invention to be administered alone, it is preferable to present it as a pharmaceutical formulation, together with one or more acceptable carriers. The carrier(s) must be “acceptable” in the sense of being compatible with the compound of the invention and not deleterious to the recipients thereof. Typically, the carriers will be water or saline which will be sterile and pyrogen free.

[0086] In preferred embodiments, the mucin-binding targeting agent is administered to a subject or patient at a clinically relevant dose.

[0087] In yet other embodiments, suitable routes of administration are considered to be enteral administration, topical administration, and parenteral administration.

[0088] By enteral administration, we include methods including but not limited to oral administration, rectal administration, sublingual administration, sublabial administration, and buccal administration. Forms suitable for such administration include but are not limited to pills, tablets, osmotic controlled release capsules, solutions, softgels, suspensions, emulsions, syrups, elixirs, tinctures, hydrogels, ointments, suppositories, enemas, murphy drip, and nutrient enemas.

[0089] By topical administration, we include methods including but not limited to transdermal administration, vaginal administration, ocular administration, and nasal administration. Forms suitable for such administration include but are not limited to aerosols, creams, foams, gels, lotions, ointments, pastes, powders, shake lotions, solids (e.g., suppositories), sponges, tapes, tinctures, topical solutions, drops, rinses, sprays, transdermal patches, and vapors.

[0090] By parenteral administration, we include methods including but not limited to injection, insertion of an indwelling catheter, transdermal, and transmucosal administration. Such administration routes include but are not limited to epidural administration, intracerebral administration, intracerebroventricular administration, epicutaneous administration, sublingual administration, extra-amniotic administration, intra-arterial administration, intra-articular administration, intracardiac administration, intracavernous administration, intralesional administration, subcutaneous administration, intradermal administration, intralesional administration, intramuscular administration, intraosseous administration, intraperitoneal administration, intrathecal administration, intrauterine administration, intravaginal administration, intravesical administration, intravitreal administration, subcutaneous administration, transdermal administration, perivascular administration, and transmucosal administration. In particular, we include methods of administration including but not limited to epidural injection, intracerebral injection, intracerebroventricular injection, sublingual injection, extra-amniotic injection, intra-arterial injection, intra-articular injection, intracardial injection, intrapericardial injection, intracavernous injection, subcutaneous injection, intradermal injection, intramuscular injection, intraosseous injection, intraperitoneal injection, intrathecal injection, intrauterine injection, intravesical injection, intravitreal injection, subcutaneous injection, and perivascular injection.

[0091] The mucin-binding targeting agents of the invention and/or compositions comprising such agents may be for use as a medicament.

[0092] The mucin-binding targeting agents of the invention and/or compositions comprising such agents may be for use in the treatment of a disease, illness, or disorder in a subject.

[0093] Disease, illness, or disorder to be treated may be selected from the group of inflammatory, immunological, endocrine, or metabolic disorders such as obesity or may be neurological, psychological or psychiatric or mood disorders, or disorders of the nervous system, or sexual disorders including reproductive disorders and disorders of the genital system , or may be neoplastic disorders such as cancers. Also contemplated are disorders involving dysfunction of mucous tissue or dysfunction of epithelial tissue, including disorders, diseases, and illnesses of the gastrointestinal tract, nasal disorders, disorders and diseases of the eye, myopathy, obesity, anorexia, weight maintenance, diabetes, disorders associated with mitochondrial dysfunction, genetic disorders, cancer, heart disease, inflammation, disorders associated with the immune system, infertility, disease associated with the brain and/or metabolic energy levels.

[0094] Provided herein are also methods of delivery of one or more payloads to a tissue in a subject, wherein the tissue expresses one or more of MUC2, MUC5AC, MUC5B, MUC21. Such methods comprise administering to the subject a pharmaceutical composition comprising a mucin-binding targeting agent in the form of a peptide as provided herein and a payload bound to the polypeptide. The tissue may be located in the gastrointestinal tract, or may be epithelial or non-epithelial tissue located elsewhere. It is contemplated that the binding of the payload to the agent may be via the binding moiety. The binding moiety may be able to release the payload in vivo, such as at the target tissue, e.g. by being able to undergo acid hydrolysis or cleavage by an enzyme such as a protease.

[0095] The mucin-binding targeting agents described herein are advantageous in that they display a very distinct selectivity for specific mucins which allows precision targeting to desired tissues with reduced off-targeting and therefore less adverse effects. In particular, the mucin-binding targeting agents have low affinity for MUC1 compared to desired mucins, such as MUC5AC which is highly expressed in the gastrointestinal tract and the respiratory mucosal surfaces.

[0096] Additionally, the mucin-binding targeting agents display very high affinity for selected mucins that are orders of magnitude higher than traditional glycan-binding proteins, including lectins, that bind to sugars. This strong interaction with the target mucin facilitates prolonged retention of the mucin-binding targeting agent and any associated payload at a desired site of action.

[0097] The mucin-binding targeting agents of the invention may comprise an isolated X409 peptide according to SEQ ID NO:1, or a sequence having a certain sequence identity thereto. Such sequence identity may be e.g. 65% or more, such as 70% or more, such as 80% or more, such as 85% or more, such as 90 percent or more, such as 95% or more, such as 96% or more, such as 97% or more, such as 98% or more, such 99% or more, such as 99.5% or more. Sequence identity may be calculated using techniques known in the art, such as those of Example 4.

[0098] In some embodiments of the invention, the mucin-binding targeting agent consist of the isolated X409 peptide according to SEQ ID NO:1 or a sequence with at least 75% sequence identity to SEQ ID NO:1, such as at least 80% sequence identity to SEQ ID NO:1, such as at least 90% sequence identity to SEQ ID NO:1, such as at least 95% sequence identity to SEQ ID NO:1.

[0099] The X409 peptide may come from different bacterial source as this particular domain shares a high degree of homology across species. Thus, an embodiment of the present invention relates to the mucin-binding targeting agent, wherein the isolated peptide comprises an X409 peptide according to SEQ ID NO:1 or a X409 peptide derived from E. coli, A. Hydrophilia, or S. baltica having at least 75% sequence identity to SEQ ID NO: 1.

[0100] Another embodiment of the present invention relates to the mucin-binding targeting agent, wherein the isolated peptide is a X409 peptide selected from the group consisting of:

[0101] i) SEQ ID NO: 1, SEQ ID NO: 73, SEQ ID NO:74, and SEQ ID NO:135, and

[0102] ii) isolated peptides comprising an amino acid sequence having at least 90% sequence identity to any one of SEQ ID NO: 1, SEQ ID NO: 73, SEQ ID NO:74, or SEQ ID NO:135.

[0103] A preferred embodiment of the present invention relates to the mucin-binding targeting agent, wherein the isolated peptide comprises SEQ ID NO:135 (E. coli (accession number AUM10835)) or an isolated peptide comprising an amino acid sequence having at least 90% sequence identity to SEQ ID NO:135.

[0104] Another preferred embodiment of the present invention relates to the mucin-binding targeting agent, wherein the isolated peptide comprises SEQ ID NO:73 (Shewanella baltica OS223 (accession number ACK48812)) or an isolated peptide comprising an amino acid sequence having at least 90% sequence identity to SEQ ID NO:73.

[0105] A further preferred embodiment of the present invention relates to the mucin-binding targeting agent, wherein the isolated peptide comprises SEQ ID NO:74 (Aeromonas hydrophilia (accession number QBX76946)) or an isolated peptide comprising an amino acid sequence having at least 90% sequence identity to SEQ ID NO:74.

[0106] The mucin-binding targeting agents of the invention may comprise an isolated X409 peptide according to any one of SEQ ID NO:73, SEQ ID NO:74, or SEQ ID NO:135, or a sequence having a certain sequence identity thereto. Such sequence identity may be e.g. 65% or more, such as 70% or more, such as 80% or more, such as 85% or more, such as 90 percent or more, such as 95% or more, such as 96% or more, such as 97% or more, such as 98% or more, such 99% or more, such as 99.5% or more.

[0107] An embodiment of the present invention relates to the mucin-binding targeting agent, wherein the isolated peptide is a X409 peptide selected from the group consisting of:

[0108] i) SEQ ID NO: 100, SEQ ID NO: 109, SEQ ID NO: 165, SEQ ID NO: 174, SEQ ID NO:450, SEQ ID NO:609, SEQ ID NO:906, SEQ ID NO: 1066, and

[0109] ii) isolated peptides comprising an amino acid sequence having at least 90% sequence identity to any one of SEQ ID NO: 100, SEQ ID NO: 109, SEQ ID NO: 165, SEQ ID NO: 174, SEQ ID NO:450, SEQ ID NO:609, SEQ ID NO:906, and SEQ ID NO: 1066.

[0110] Another embodiment of the present invention relates to the mucin-binding targeting agent, wherein the isolated peptide comprises SEQ ID NO:109 (Vibrio anaquillarum (Gene Bank accession number AZS25716)) or an isolated peptide comprising an amino acid sequence having at least 90% sequence identity to SEQ ID NO:109.

[0111] It is to be understood, that these mucin-binding targeting agents may comprise or be attached to a payload as described herein. This can be in form of a fusion protein or as a conjugate or complex with another particle or vehicle, such as a lipid particle.

[0112] The mucin-binding targeting agents of the invention may alternatively comprise an isolated peptide according to any one of SEQ ID NO: 2 to 5, or a sequence having a certain sequence identity thereto. Such sequence identity may be e.g. 65% or more, such as 70% or more, such as 80% or more, such as 85% or more, such as 90 percent or more, such as 95% or more, such as 96% or more, such as 97% or more, such as 98% or more, such 99% or more, such as 99.5% or more. Sequence identity may be calculated using techniques known in the art, such as those of Example 4.

### Experimental Procedures

### Methods

### Cell Culture

[0113] HEK293^{WT} (ECACC 85120602) and all isogenic clones were cultured in DMEM (Sigma-Aldrich) supplemented with 10% heat-inactivated fetal bovine serum (Sigma-Aldrich) and 2 mM GlutaMAX (Gibco) in a humidified incubator at 37° C. and 5% CO2. The glycoengineered isogenic HEK293 cells used in this study part of the previously reported cell-based glycan array resource^{36,37}.

### Gene Engineering

[0114] CRISPR/Cas9 KO was performed using the GlycoCRISPR resource containing validated gRNAs libraries for targeting of all human glycosyltransferases⁴⁷, and site-directed KI was performed using a modified ZFN ObLigaRe targeted KI strategy, as previously described^{48,49}. In brief, HEK293 cells grown in 6-well plates (NUNC) to ˜70% confluency were transfected for CRISPR/Cas9 KO with 1 mg of gRNA and 1 mg of GFP-tagged Cas9-PBKS and for targeted KI with 0.5 mg of each ZFN-tagged with GFP/Crimson targeted to the safe-harbor AAVS1 site and 1 ug of respective donor plasmid. 24 h post-transfection, cells were bulk-sorted based on GFP expression by FACS (SONY SH800). After one week of culture, the bulk-sorted cells were single cell-sorted into 96-well plates and KO clones were screened for by Indel Detection by Amplicon Analysis (IDAA) as described⁵⁰, and gene KO of final clones was verified by Sanger sequencing. The allelic insertion status of KI clones was screened by junction PCR with a primer pair covering the junction area between donor plasmid and the AAVS1 locus, and a primer pair flanking the targeted KI locus.

### Human Mucin TR Reporters

[0115] Transmembrane and secreted mucin TR reporter expression constructs were designed as previously described by use of exchangeable inserts of 150-200 amino acids derived from the TR regions of human mucins (FIG. 1 and Table 1)³⁶. The secreted TR constructs contain NotI/XhoI restriction sites and a 6xHis tag STOP encoding ds oligo (5′-GCGGCCGCCCATCACCACCATCATCACTGATAGCGCTCGAG-3′, NotI/XhoI restriction sites underlined). We also included a TR reporter design containing six 11-mer sequences with a single O-glycosylation site (AEAAATPAPAKₙ₌₆) to serve as control for the patterns of O-glycans found in mucin TRs (FIG. 2).

Transient Transfection with Mucin TR Reporters

[0116] Transmembrane GFP-tagged mucin TR reporter constructs were transiently expressed in engineered HEK293 cells. Briefly, cells were seeded in 24-wells (NUNC) and transfected at ˜70% confluency with 0.5 μg of plasmids using Lipofectamine 3000 (Thermo Fisher Scientific) following the manufacturer's protocol. Cells were harvested 24 h post-transfection and used for assays followed by flow cytometry analysis.

### Production and Purification of Recombinant Mucin TR Reporters

[0117] The secreted reporter constructs were stably expressed in isogenic HEK293-6E cell lines selected by two weeks of culture in the presence of 0.32 μg/mL G418 (Sigma-Aldrich) and two rounds of FACS enrichment for GFP expression. A stable pool of cells was seeded at a density of 0.25×10⁶ cells/ml and cultured for 5 days on an orbital shaker in F17 medium (Gibco) supplemented with 0.1 Kolliphor P188 (Sigma-Aldrich) and 2% Glutamax. Culture medium containing secreted mucin TR reporter was harvested (3,000×g, 10 min), mixed 3:1 (v/v) with 4× binding buffer (100 mM sodium phosphate, pH 7.4, 2 M NaCl), and run through a nickel-nitrilotriacetic acid (Ni-NTA) affinity resin column (Qiagen), pre-equilibrated with washing buffer (25 mM sodium phosphate, pH 7.4, 500 mM NaCl, 20 mM imidazole). The column was washed multiple times with washing buffer and mucin TR reporter was eluted with 200 mM imidazole. Eluted fractions were analyzed by SDS-PAGE and fractions containing the mucin TR reporter were desalted followed by buffer exchange to MiliQ using Zeba spin columns (Thermo Fisher Scientific). Yields were quantified using a Pierce™ BCA Protein Assay Kit (Thermo Fisher Scientific) following the manufacturer's instructions and NuPAGE Novex Bis-Tris (4-12%, Thermo Fisher Scientific) Coomassie blue analysis.

### O-Glycoprofiling

[0118] HPLC (C4) purified mucin TR reporters (10 μg) were incubated in 0.1M NaOH and 1M NaBH4 at 45° C. for 16 h. Released O-glycan alditols were desalted by cation-exchange chromatography (Dowex AG 50W 8X). Borate salts were converted into methyl borate esters by adding 1% acetic acid in methanol and evaporated under N₂ gas. Desalted O-glycan alditols were permethylated (in 150 μL DMSO, ˜20 mg NaOH powder, 30 μl methyl iodide) at room temperature for 1 h. The reaction was terminated by addition of 200 μL ice-cold MQ water followed by the addition of ˜200 μL chloroform. The organic phase was washed 5 times with 1 mL MQ water and evaporated under N₂ gas. Permethylated O-glycans were purified by custom Stage Tips (C18 sorbent from Empore 3 M) and eluted in 20 mL 35% (v/v) acetonitrile, of which 1 μl was co-crystalized with 1 μL DHB matrix (10 mg/ml in 70% acetonitrile, 0.1% TFA, 0.5 mM sodium acetate) before positive mode MALDI-TOF analysis.

### Isolation of Mucin TR O-glycodomains

[0119] Ni-chromatography purified intact mucin TR reporters (50 μg) were digested with 1 μg Lys-C (Roche) at a 1:35 ratio at 37° C. for 18 h in 50 mM ammonium bicarbonate buffer (pH 8.0). After heat inactivation at 98° C. for 15 min, reactions were dried by speed vac and desialylated with 40 mU C. perfringens neuraminidase (Sigma-Aldrich) for 5 hrs at 37° C. in 65 mM sodium acetate buffer (pH 5.0). This step was omitted for reporters expressed in HEK293^{KO COSMC} (Tn glycoforms). Samples were heat inactivated at 98° C. for 15 min and dried. For intact MS analysis samples were separated on by C4 HPLC (Aeris™ C4, 3.6 μm, 200 a, 250×2.1 mm, Phenomenex) using a 0-100% gradient of 90% acetonitrile in 0.1% TFA. Fractions containing the released TR O-glycodomains were verified by ELISA with lectins or mAbs, dried and resuspended in 20 μl of 0.1% FA for intact mass analysis. For bottom up analysis of the MUC1 reporter, samples (20 μg) were further digested 2× with 0.67 μg Endo-AspN at a 1:35 ratio for 18 hrs at 37° C. in 100 mM Tris-HCL (pH 8.0). After inactivation by the addition of 1 mL of concentrated TFA, samples were desalted using custom Stage Tips (C18 sorbent from Empore 3 M) and analyzed by LC-MS/MS.

### O-glycopeptide Bottom Up Analysis of Mucin TRs

[0120] LC MS/MS analysis was performed on EASY-nLC 1200 UHPLC (Thermo Fisher Scientific) interfaced via nanoSpray Flex ion source to an Orbitrap Fusion Lumos MS (Thermo Fisher Scientific). Briefly, the nLC was operated in a single analytical column set up using PicoFrit Emitters (New Objectives, 75 mm inner diameter) packed in-house with Reprosil-Pure-AQ C18 phase (Dr. Maisch, 1.9-mm particle size, 19-21 cm column length). Each sample was injected onto the column and eluted in gradients from 3 to 32% B for glycopeptides, and 10 to 40% for released and labeled glycans in 45 min at 200 nL/min (Solvent A, 100% H2O; Solvent B, 80% acetonitrile; both containing 0.1% (v/v) formic acid). A precursor MS1 scan (m/z 350-2,000) of intact peptides was acquired in the Orbitrap at the nominal resolution setting of 120,000, followed by Orbitrap HCD-MS2 and ETD-MS2 at the nominal resolution setting of 60,000 of the five most abundant multiply charged precursors in the MS1 spectrum; a minimum MS1 signal threshold of 50,000 was used for triggering data-dependent fragmentation events. Targeted MS/MS analysis was performed by setting up a targeted MSn (tMSn) Scan Properties pane.

### Intact Mass Analysis of Mucin TRs

[0121] Samples were analyzed by EASY-nLC 1200 UHPLC (Thermo Scientific Scientific) interfaced via nanoSpray Flex ion source to an on OrbiTrap Fusion/Lumos instrument (Thermo Scientific Scientific) using “high” mass range setting in m/z range 700-4000. The instrument was operated in “Low Pressure” Mode to provide optimal detection of intact protein masses. MS parameters settings: spray voltage 2.2 kV, source fragmentation energy 35 V. All ions were detected in OrbiTrap at the resolution of 7500 (at m/z 200). The number of microscans was set to 20. The nLC was operated in a single analytical column set up using PicoFrit Emitters (New Objectives, 75 mm inner diameter) packed in-house with C4 phase (Dr. Maisch, 3.0-mm particle size, 16-20 cm column length). Each sample was injected onto the column and eluted in gradients from 5 to 30% B in 25 min, from 30 to 100% B in 20 min and 100% B for 15min at 300 nL/min (Solvent A, 100% H2O; Solvent B, 80% acetonitrile; both containing 0.1% (v/v) formic acid).

### Data Analysis

[0122] Glycopeptide compositional analysis was performed from m/z features extracted from LC-MS data using in-house written SysBioWare software⁵¹. For m/z feature recognition from full MS scans Minora Feature Detector Node of the Proteome discoverer 2.2 (Thermo Fisher Scientific) was used. The list of precursor ions (m/z, charge, peak area) was imported as ASCII data into SysBioWare and compositional assignment within 3 ppm mass tolerance was performed. The main building blocks used for the compositional analysis were: NeuAc, Hex, HexNAc, dHex and the theoretical mass increment of the most prominent peptide corresponding to each potential glycosites. Upon generation of the potential glycopeptide list each glycosite was rank for the top 10 most abundant candidates and each candidate structure was confirmed by doing targeted MS/MS analysis followed by manual interpretation of the corresponding MS/MS spectrum. For intact mass analysis raw spectra were deconvoluted to zero-charge by BioPharma Finder Software (Thermo Fisher Scientific, San Jose) using default settings. Glycoproteoforms were annotated by in-house written SysBioWare software⁵¹ using average masses of Hexose, N-acetylhexosamine, and the known backbone mass of mucin TR reporter increment (MUC1, MUC2, MUC7, etc)

### Cell Binding Assays

[0123] For lectin staining HEK293 cells transiently expressing mucin TR reporters were incubated on ice or at 4° C. with biotinylated PNA, VVA (Vector Laboratories) or Pan-lectenz (Lectenz Bio) diluted in PBA (1× PBA containing 1% BSA (w/v)) for 1 h, followed by washing and staining with Alexa Fluor 647-conjugated streptavidin (Invitrogen) for 20 min. Stainings with mAbs specific to mucin glycoforms produced in mice was performed by incubating cells for 30 min at 4° C. with supernatant harvested from the respective hybridoma followed by staining with FITC-conjugated polyclonal rabbit anti-mouse Ig (Dako). Cells were stained with GST-tagged streptococcal adhesins at different concentrations diluted in PBA for 1 h on ice, followed by incubation with rabbit polyclonal anti-GST antibodies (Thermo Fisher) for 1 h and subsequent staining with Alexa Fluor 647 conjugated goat anti-rabbit IgG (Thermo Fisher) for 1 h. All cells were resuspended in PBA for flow cytometry analysis (SONY SA3800).

### ELISA

[0124] ELISA assays were performed using MaxiSorp 96-well plates (Nunc) coated with dilutions of purified mucin TR reporters starting from 100 ng/ml or fractions derived from C4 HPLC incubated o/n at 4° C. in 50 ml carbonate-bicarbonate buffer (pH 9.6). Plates were blocked with PLI-P buffer (PO₄, Na/K, 1% Triton-X100, 1% BSA, pH 7.4) and incubated with mAbs (undiluted culture sups or as indicated) or biotinylated-lectins (Vector Laboratories and Lectenz Bio) for 1 h at RT, followed by extensive washing with PBS containing 0.05% Tween-20, and incubation with 50 ml of 1 ug/mL HRP conjugated anti mouse Ig (Dako) or 1 ug/mL streptavidin-conjugated HRP (Dako) for 1 h. Plates were developed with TMB substrate (Dako) and reactions were stopped by addition of 0.5 M H2SO4 followed by measurement of absorbance at 450 nm.

### StcE Proteolytic Activity and Binding Assays

[0125] Recombinant StcE, StcE^{E447D}, StcE^{ΔX409}, and X409 were produced in E. coli similarly as reported previously²⁴. Enzyme assays with purified intact mucin reporters (500 ng) were performed by incubating serial dilutions of StcE for 2 h at 37° C. in 20 mL reactions in 50 mM ammonium bicarbonate buffer, and reactions were stopped by heat-inactivation at 95° C. for 5 min. Samples were run on NuPAGE Novex gels (Bis-Tris 4-12%) at 100 V for 1 h followed by staining with Krypton Fluorescent Protein Stain (Thermo Fisher Scientific) according to the manufacturer's instructions. Gels were imaged using an ImageQuant LAS 4000 system (GE Healthcare). Cell-based activity assays were performed with HEK293 cells transiently expressing mucin TR reporters incubated with serial dilutions of StcE in PBA at 37° C. After 1 h, cells were washed with PBA, stained with APC-conjugated anti-FLAG antibody (BioLegend) for 30 min at 4° C., and washed cells were analyzed by flow cytometry. Mean fluorescent intensity of anti-FLAG binding to GFP positive (transfected) and negative (untransfected) populations was quantified as using FlowJo (FlowJo LLC). For cell-binding assays with X409-GFP, HEK293 cells expressing CFP-tagged membrane TR reporters were used. Cells were incubated with different concentrations of X409-GFP for 1 h at 4° C. followed by staining with APC-conjugated anti-FLAG antibody. X409-GFP binding to anti-FLAG positive cells was quantified using FlowJo software. For histology analysis, deparrafinized tissue microarray sections52 were microwave treated for 20 min in sodium citrate buffer (10 mM, pH 6.0) for antigen retrieval followed by 1 h blocking with 1× PBS containing 5% BSA (w/v). Sections were incubated o/n at 4° C. with 5 μg/ml 6xHis-tagged StcE or StcE^{ΔX409} followed by washing and subsequent 1 h incubation with first mouse anti-6xHis antibody (Thermo Fisher) and second AF488-conjugated rabbit anti-mouse IgG (Invitrogen).

[0126] Sections stained with 2 μg/ml GFP-X409 were optionally sialidase treated and co-stained with mouse anti-MUC2 (PMH1) and donkey-anti mouse IgG Cy3 (Jackson ImmunoResearch). All samples were mounted with ProLong Gold Antifade Mountant with DAPI (Molecular Probes) and imaged using a Zeiss microscopy system followed by analysis with ImageJ (NIH).

Data analysis

[0127] Glycopeptide compositional analysis was performed from m/z features extracted from LC-MS data using in-house written SysBioWare software⁵¹. For m/z feature recognition from full MS scans Minora Feature Detector Node of the Proteome discoverer 2.2 (Thermo Fisher Scientific) was used. The list of precursor ions (m/z, charge, peak area) was imported as ASCII data into SysBioWare and compositional assignment within 3 ppm mass tolerance was performed. The main building blocks used for the compositional analysis were: NeuAc, Hex, HexNAc, dHex and the theoretical mass increment of the most prominent peptide corresponding to each potential glycosite. Upon generation of the potential glycopeptide list each glycosite was ranked for the top 10 most abundant candidates and each candidate structure was confirmed by doing targeted MS/MS analysis followed by manual interpretation of the corresponding MS/MS spectrum. For intact mass analysis raw spectra were deconvoluted to zero-charge by BioPharma Finder Software (Thermo Fisher Scientific, San Jose) using default settings. Glycoproteoforms were annotated by in-house written SysBioWare software⁵¹ using the average masses of Hexose, N-acetylhexosamine, and the known backbone mass of mucin TR reporter increment.

TABLE 1
Amino Acid sequences of Reporter Constructs Used, Related to Figure 1 and 2

| Gene | Uniprot | | Postion in | length | |
|---|---|---|---|---|---|
| (HGNC) | ID | | Uniprot ID | (aa) | Sequence |
| MUC1 | P15941 | | 121-260 | 140 | APDNKPAPGSTAPPAHGVTS APDTRPAPGSTAPPAHGVTS APDTRPAPGSTAPPAHGVTS APDTRPAPGSTAPPAHGVTS |
| | | | | | APDTRPAPGSTAPPAHGVTS APDTRPAPGSTAPPAHGVTS APDTRPAPGSTAPPAHGVTS |
| MUC2 | A0A3S8T | #1 | 1406-1554 | 149 | PSPPPTST TTLPPTTT PSPPTTTT TTPPPTTT PSPPITTT TTPPPTTT PSPPISTT TTPPPTTT PSPPTTT PS PPTTT |
| | MF2* | #2 | 1916-2064** | 152 | PSPPTTTT TTPPPTTT PS PPTTT PITPPAST TTLPPTTT PSPPTTTT TTPPPTTT PSPPTTT PITPPTST T |
| | | | | | PTQTPTTTPITTTTTVTPTPTPT GTQTPTPTPITTTTTVTPTPTPT GTQTPTSTPITTTTTVTPTPTPT |
| | | | | | GTQTPTMTPITTTTTVTPTPTPT GTQTPTTTPISTTTTVTPTPTPT GTQTPTSTPITTTTTVTPTPTPT GTQTPTTTPITTAA |
| MJC3A | Q02505 | #1 | 391-538 | 148 | TTEISSHSTPSFSSSTIYSTVSTSTTAISSLPPTSGTMVTSTTMTPSSLSTDIPFTTPTTITHHSVGSTGFLTTATDLTSTFTVSSSSAMSTSVIP |
| | | | | | SSPSIQNTETSSLVSMTSATTPNVRPTFVSTLSTPTSSLLTTFPATYSFSSS |
| | | #2 | 502-645 | 144 | MTSATTPNVRPTFVSTLSTPTSSLLTTFPATYSFSSSMSASSAGTTHTESISSPPASTSTLHTTAESTLAPTTTTSFTTSTTMEPPSTTAATTGTG |
| | | | | | QTTFTSSTATFPETTTPTPTTDMSTESLTTAMTSPPITSSVTSTNTVT |
| | | #3 | 612-762 | 151 | TTPTPTTDMSTESLTTAMTSPPITSSVTSTNTVTSMTTTTSPPTTTNSFTSLTSMPLSSTPVPSTEVVTSGTINTIPPSILVTTLPTPNASSMTTS |
| | | | | | ETTYPNSPTGPGTNSTTEITYPTTMTETSSTATSLPPTSPLVSTAKTAKTPTTNL |
| | | #4 | 2227-2361 | 135 | TTTETTSHSTPGFTSS ITTTETTSHSTPSFTSS ITTTETTSHDTPSFTSS ITTSETPSHSTPSSTSLITTTKTTSHSTPSFTSS |
| | | | | | ITTTETTSHSAHSFTSS ITTTETTSHNTRSFTSS ITTTETNSHSTTSFTSS |
| MJC4 | E9PDY6 | | 1184-1327 | TQT | PLPVTSPSSASTGHAT PLLVTDTSSASTGHAT PLPVTDASSVSTDHAT SLPVTIPSAASTGHTT |
| | | | | | PLPVTDTSSASTGQATSLLVTDTSSVSTGDTT PLPVTSTSSASTGHVT PLHVTSPSSASTGHAT PLPVTSLSSASTGDTM |
| MUCSAC | P98088 | | 2708-2850 | 142 | TTSAPTT STTSAPTT STISAPTT STTSATTT STTSAPTP RRTSAPTT STISASTT STTSATTT STTSATTTSTISAPTT |
| | | | | | STTLSPTT STTSTTIT STTSAPIS STTSTPQT STTSAPTT STTSGPGT TSSPVPTT STTSAPTT |
| MUC5B | Q9HC84 | #1 | 1889-2029 | 141 | PATSSTATPSSTPGTTWILTKPTTTATTTASTGSTATPTSTLRTAPPPKVLTTTATTPTVTSSKATPSSSPGTATALPALRSTATTPTATSVTPIP |
| | | | | | SSSLGTTWTRLSQTTTPTATMSTATPSSTPETAHTSTVLTATATT |
| | | #2 | 1990-2129 | 140 | TTWTRLSQTTTPTATMSTATPSSTPETAHTSTVLTATATTTGATGSVATPSSTPGTAHTTKVPTTTTTGFTATPSSSPGTALTPPVWISTTTTPTT |
| | | | | | RGSTVTPSSIPGTTHTATVLTTTTTTVATGSMATPSSSTQTSGT |
| | | #4 | 2070-2199 | 130 | ALTPPVWISTTTTPTTRGSTVTPSSIPGTTHTATVLTTTTTTVATGSMATPSSSTQTSGTPPSLTTTATTITATGSTTNPSSTPGTTPIPPVLTTT |
| | | | | | ATTPAATSNTVTPSSALGTTHTPPVPNTMATTHG |
| MUC6 | A0A3Q8T | #1 | 4881-4961 | 123 | TSATSSRLPTPFTTHSPPTGTTPISSTGPVTATSFQTTTTYPTPSHPHTTLPTHVPSFSTSLVTPSTHTVIIPTHTQMATSASIHSMPTGTIPPPT |
| | | | | | TIKATGSTHTAPPMTPTTSGTSQSPS |
| | MU7* | #2 | 4962-5048 | 86 | ASIHSMPTGTIPPPTTIKATGSTHTAPPMTPTTSGTSQSPSSFSTAKTSTSLPYHTSSTHHPEVTPTSTTNITPKHTSTGTRTPVAH |
| MUC7 | Q8TAX7 | | 192-351 | 160 | PPTPSATTQAPPSSSAPPE TTAAPPTPPATTPAPPSSSAPPE TTAAPPTPSATTPAPLSSSAPPE |
| | | | | | TTAVPPTPSATTLDPSSASAPPETTAAPPTPSATTPAPPSSPAPQE TTAAPITTPNSSPTTLAPDTSET |
| | | | | | SAAPTHQTTTSVTTQTTTTKQPTSAP |
| OVGP1 | Q12889 | | 476-564 | 89 | AMTMTSVGHQSMTP GEKALTPVGHQSVTT GQKTLTSVGYQSVTP GEKTLTPVGHQSVTP VSHQSVSPGGTTMTP VHFQTETLRQNTVAP |
| (MUC9) | | | | | |
| MUC13 | Q9H3R2 | | 30-171 | 142 | TTETATSGPTVAAADTTETNFPE TASTTANTPSFPTATS PAPPIISTHSSSTIPT PAPPIISTHSSSTIPI |
| | | | | | PTAADSESTTNVNSLATSDIITASSPNDGLIT MVPSETQSNNEMSPTT EDNQSSGPPTGTALLE TSTLNST |
| MUC17 | Q685J3 | | 2181-2329 | 149 | LSTTPVDTSTPVTNSTEARSSPTTSEGTSMPTSTPSEGSTPFTSMPVSTMPVVTSEAST |
| | | | | | LSATPVDTSTPVTTSTEATSSPTTAEGTSIPTSTLSEGTTPLTSIPVSHTLVANSEVSTLSTTPVDSNTPFTTSTEASSPPPTAEGTSMP |
| MUC19 | Q7Z5P9 | | 3353-3501 | 149 | VTRTTRSSA GLTGKTGLSA GVTGKTGLSA EVTGTTRLSA GVTGTTGPSP GVTGTTGTPA GVTGTTELSA |
| | | | | | GVTGKTGLSSEVTETTGLSY GVKRTIGLSA GSTGTSGQSA GVAGTTTLSA EVTGTTRPSA GVTGTTGLSA EVTEITGISA |
| MUC20 | Q8N307 | | 175-325 | 151 | ESSASSDSPHPVITPSRA SESSASSDGPHPVITPSRA SESSASSDGPHPVITPSRA SESSASSDGPHPVITPSRA |
| | | | | | SESSASSDGPHPVITPSRA SESSASSDGPHPVITPSRA SESSASSDGPHPVITPSRA SESSASSDGPHPVITPSRA |
| MUC21 | Q5SSG8 | | 130-278 | 149 | SGASTATNSDSSTT SSGASTATNSDSSTT SSEASTATNSESSTT SSGASTATNSESSTV SSRASTATNSESSTT |
| | | | | | SSGASTATNSESRTT SNGAGTATNSESSTT SSGASTATNSESSTP SSGAGTATNSESSTT SSGAGTATNSESSTV |
| MUC22 | E2RYF6 | | 336-483 | 148 | GTTTASMAG SETTVSTAG SETTTVSITG TETTMVSAMG SETTTNSTTS SETTVTSTAG SETTTVSTVG SETTTAYTAD |
| | | | | | SETTAASTTG SEMTTVFTAG SETITPSTAG SETTTVSTAG SETTTVSTTG SETTTASTAH SETTAASTMG |
| GP1BA | P07359 | | 281-499 | 219 | PTLGDEGDTDLYDYYPEEDTEGDKVRATRTVVKFPTKAHTTPWGLFYSWSTASLDSQMPSSLHPTQESTKEQTTFPPRWTPNFTLHMESIT |
| | | | | | FSKTPKSTTEPTP SPTTSEPVPEPAP NMTTLEPTP SPTTPEPTSEPAP |
| | | | | | SPTTPE PTSEPAP SPTTPEPTSEPAP SPTTPEPTPIPTI ATSPTILVSATSLITPKSTFLTTTKPVSLLESTKKTIPELD |
| Ctrl | | | | 67 | PAEAAATPAPAK AEAAATPAPAK AEAAATPAPAK AEAAATPAPAK AEAAATPAPAK AEAAATPAPAK |

*Uniprot ID has been reported in Frida Svensson et al. (2018) Scientific reports 8, 17503.
**The amino acid number is derived from the incomplete version of human MUC2 sequence registrated in Uniprot Q02817

### EXAMPLES

[0128] The purpose of the following examples is given as an illustration of various aspects of the invention and are thus not meant to limit the present invention in any way. Along with the present examples the methods described herein are presently representative of preferred aspects, are exemplary, and are not intended as limitations on the scope of the invention. Changes therein and other uses which are encompassed within the spirit of the invention as defined by the scope of the claims will occur to those skilled in the art.

[0129] Example 1—Engineering Strategy for Display of the Human Mucinome

[0130] For long mucins have represented a black box in exploring the molecular cues that serve in intrinsic interactions with glycan-binding proteins and in extrinsic interactions with microorganisms⁵³. Dissection of interactions with simple O-glycan structures found on mucins have benefited tremendously from the development of printed glycan arrays^{43,54}, and these have for decades served as essential tools in exploring the interactome of glycans and proteins⁴¹. However, mucins and their large variable TR domains present O-glycans in different densities, and patterns are likely to provide more specific interactions and instructive cues. Mucin TRs differ markedly in sequence, length and numbers within closely related mammals⁹, and this divergence in TRs may have evolved to accommodate specific recognition of higher order patterns and clusters of O-glycans³⁶. We previously provided evidence for this by use of the cell-based glycan array demonstrating that two distinct streptococcal Siglec-like adhesins bind selectively to O-glycans presented on distinct mucin-like domains in O-glycoproteins and mucins³⁶.

[0131] Cell-based display strategies allow for presentation of glycans in the natural context of glycoproteins and the cell surface, and this has provided the first experimental evidence for the existence of higher order binding motifs consisting of O-glycans in dense patterns³⁶. We hypothesized that the main cues for the microbiota lie in the TR regions that display O-glycans of diverse structures and position in unique patterns. The traditional interpretation is that the divergence in TR sequences has co-evolved with the microbiota to govern refined interactions with larger motifs of O-glycan patterns as recently suggested for streptococcal serine-rich adhesins³⁶. The TR regions of mucins are quite distinct in length and in sequences with distinct spacing of O-glycosites⁵⁵, and TRs in any mucin exhibit individual variability in numbers as well as to some degree in actual sequences¹⁰. Thus, there are rich opportunities for unique codes in mucin TRs, governed by the particular display of patterns and structures of O-glycans. The mucin TRs and their glycocodes may be considered as the informational content of mucins and thus comprise the mucinome. The TR mucinome provides a much greater potential binding epitome than the comparatively limited repertoire of binding epitopes comprised of simple oligosaccharide motifs available in humans⁴².

[0132] We therefore sought to capture the molecular cues contained in human mucin TRs and enable molecular dissection of these cues. We developed a cell-based platform for display and production of representative mucin TRs with defined O-glycans. We reasoned that most of the features of human mucin TRs could be displayed in shorter segments of 150-200 amino acids, and used a GFP-tagged expression construct design containing representative TRs from different mucins to produce a library of cell membrane and secreted mucin TR reporters in human embryonic kidney (HEK293) cells with distinct programmed O-glycosylation capacities. Strikingly, we found that these mucin TR reporters could readily be produced as highly homogeneous molecules with essentially complete O-glycan occupancies and with distinct O-glycan structures in amounts that enabled us to characterize the simplest reporters by intact mass spectrometry (MS), and hence circumvent the longstanding obstacles with protease digestion and bottom-up analysis of mucins^{14,15}. We demonstrate that the cell-based mucin display can be used to produce and display defined mucin TRs and mucin-like O-glycodomains with custom designed O-glycosylation.

[0133] In FIG. 1 an overview of the concept for the cell-based display and production of human mucin TR reporters with programmed O-glycan structures is presented. The mucin TR reporter expression constructs were designed pairwise for either secretion or cell membrane integration through the inclusion of the C-terminal SEA and transmembrane domain of MUC1, and they all included N-terminal GFP, and FLAG tags³⁶. We generated a comprehensive set of TR reporters containing approximately 200 amino acids from the TR O-glycodomains of most human secreted and membrane bound mucins (FIG. 1). The entire sequences selected as representative for each of the human mucin TR O-glycodomains are shown in FIG. 2 and Table 1, which also illustrates that mucin TRs are imperfect in sequence but presents characteristic patterns of O-glycans. Most of the TR reporters contained multiple TR sequences, but due to the longer sequences of MUC2, MUC3, MUC5B and MUC6 TRs these mucin TR domains had to be covered by several reporters with partly overlapping sequences.

[0134] The transmembrane TR reporters were expressed transiently in glycoengineered HEK293 cells that do not appear to express endogenous mucins, and the secreted reporters were expressed stably^{36,56} We took advantage of our previously reported O-glycoengineering strategy to establish designs for homogeneous O-glycosylation capacities that result in attachment of defined O-glycan structures (FIG. 1). The gene engineering of HEK293 cells included designs for O-glycans designated In (KO C1GALT1), STn (KO COSMC/KI ST6GALNAC1), T (KO GCNT1, ST3GAL1/2, ST6GALNAC2/3/4), monosialyl-T (mSTa) (KO GCNT1, ST6GALNACT2/3/4), as well as ST comprised of a mixture of mSTa and disialyl-T (dST) (KO GCNT1)³⁸, and the structures, biosynthetic pathways and genetic regulation are illustrated in FIG. 1. Wildtype HEK293WT cells produce a mixture of mono and disialylated core1 and core2 structures³⁶, and KO of GCNT1 eliminates the core2 structures resulting in a mixture of mono- and disialylated core1 O-glycans (mST and dST). KO of COSMC or C1GALT1 results in complete truncation of O-glycans and the uncapped Tn O-glycan without detectable expression of STn⁵⁷. We engineered capacity for core3 (GlcNAcβ1-3GalNAcα1-O-Ser/Thr) O-glycosylation by using AAVS1 locus targeted KI of the core3 synthase (B3GNT6) on top of KO of COSMC to eliminate competition from the core1 synthase.

[0135] To validate the cell-based mucin TR display platform we first used immunocytology analyses. We previously verified the general glycosylation outcomes of most of the glycoengineering performed in HEK293 cells³⁶. We therefore tested a subset of transiently expressed membrane bound TR reporters with lectins and monoclonal antibodies (mAbs) with well characterized specificities for distinct O-glycan structures (FIG. 3a). There was a substantial window of signal difference in flow cytometry for HEK293 cells with and without expression of the GFP-tagged mucin TR reporter. Thus, the engineered glycosylation capacity for Tn, T, and STn O-glycosylation could be shown both with the cell population not expressing the mucin TRs (GFP-negative) and the transfected cell population expressing these (GFP positive), albeit with higher intensities when mucin TRs were expressed.

[0136] We also probed the mucin TR reporters with a panel of mAbs directed to human mucin TR regions, most of which are known to be affected by O-glycosylation either because glycosylation interferes with or blocks binding to the protein core (e.g. mAb to MUC1 such as SM3 or 5E10)⁵⁸ or because O-glycans are required for the binding (e.g. mAbs to Tn-MUC1 (5E5), Tn-MUC2 (PMH1), and Tn-MUC4 (3B11)⁵⁹⁻⁶¹ (FIG. 3b). The observed reactivity patterns were in agreement with the reported specificities of the tested mAbs.

[0137] We further performed structural analysis of the isolated secreted mucin TRs. Secreted TR reporters stably expressed in glycoengineered HEK293 cells were isolated by Ni-chromatography and assessed by SDS-PAGE analysis, which showed that the GFP-tagged proteins migrated as distinct rather homogeneous bands (FIGS. 4 and 5). We used LysC digestion to liberate the intact TR O-glycodomains and C4 and C18-HPLC to purify these for further analysis (FIG. 6). For direct intact mass analysis of mucin TRs we used pretreatment with neuraminidase to reduce complexity and facilitate deconvolution and interpretation.

[0138] The dense O-glycosylation of mucin TRs in most cases blocks cleavage by peptidases limiting conventional glycoproteomics strategies^{14,16}. However, the MUC1 TRs are cleavable by endoproteinase-Asp-N (AspN) in the PDTR sequence^{17, 18,19} and we therefore used the MUC1 reporter for full characterization (FIG. 7). The MUC1 reporter contains³⁴ predicted O-glycosites and includes six 20-mer TRs and a C-terminal TR where the last GVTSA sequence proceeds into the 6XHis tag. We used LysC to cleave the purified GFP-tagged reporter and isolate the TR O-glycodomain for LC-MS intact MS analysis (FIG. 7a). The simplest Tn glycoform (HEK293^{KO C1GALT1}) revealed a rather small range of incremental masses corresponding to HexNAc (203.08) centered around the predicted protein size (m/z 14,902.14) with 28-35 HexNAc residues, while the T (HEK293^{KO GCNT1, ST3GAL1/2, ST6GALNAC2/3/4}) and ST (HEK293^{KO GCNT1}) glycoforms after neuraminidase treatment generated the same narrow range of predicted 28-35 Hex-HexNAc disaccharides. In contrast, the STn glycoform (HEK293^{KO CIGALT1 KI ST6GALNAC1}) analyzed after treatment with neuraminidase produced a slightly broader range of detectable glycoforms from 18-35 HexNAcs, suggesting that ST6GALNAC1 competes partly with the completion of GalNAc glycosylation by GALNTs and in agreement with previous studies^{62,63}. Analysis of the MUC1 TR reporters after AspN digestion revealed that the predominant 20-mer glycopeptides derived from Tn-MUC1 and STn-MUC1 were those with 4-5 O-glycans per TR (FIG. 7b). For the bottom up analysis we also had to use pretreatment with neuraminidase because the sialylated glycoforms were poorly digested by AspN. For the MUC1 reporters with higher glycan complexity (T-MUC1 and ST-MUC1) the most abundant glycopeptide variants appeared to be shifted towards 3-4 O-glycans per TR (FIG. 7b), however, this result may be biased by inefficient AspN digestion since the intact MS analysis did not show the same tendency (FIG. 7a). Finally, we confirmed the glycoengineering by O-glycan profiling of released O-glycans from the MUC1 TR reporters with five different O-glycan designs by MALDI-TOF analysis (FIG. 7c).

[0139] The promising results obtained with intact MS analysis of the MUC1 TR glycodomains prompted intact MS analysis of the simplest Tn glycoforms of MUC2, MUC5AC, MUC7, MUC13, and MUC21 TR glycodomains, which showed similarly high occupancy of available glycosites with rather homogeneous patterns (FIG. 8). For most mucin TRs the proteoform with the highest number of HexNAc residues correlated with the number of potential O-glycosites with the most abundant proteofoms centered close to or a little lower than this. However, for the MUC21 TR reporter the highest abundant peaks were centered around 68-71 with 83 potential O-glycosites suggesting lower occupancy.

[0140] Example 2—Applying the Cell-based Mucin Array for Analysis of the Cleavage Activity of the Glycoprotease StcE

[0141] Cell-based display strategies allow for presentation of glycans in the natural context of glycoproteins and the cell surface, and this has provided the first experimental evidence for the existence of higher order binding motifs consisting of O-glycans in dense patterns 36. We hypothesized that the main cues for the microbiota lie in the TR regions that display O-glycans of diverse structures and position in unique patterns. The traditional interpretation is that the divergence in TR sequences has co-evolved with the microbiota to govern refined interactions with larger motifs of O-glycan patterns as recently suggested for streptococcal serine-rich adhesins³⁶. The TR regions of mucins are quite distinct in length and in sequences with distinct spacing of O-glycosites⁵⁵, and TRs in any mucin exhibit individual variability in numbers as well as to some degree in actual sequences¹⁰. Thus, there are rich opportunities for unique codes in mucin TRs, governed by the particular display of patterns and structures of O-glycans. The mucin TRs and their glycocodes may be considered the informational content of mucins and thus comprise the mucinome. The TR mucinome provides a much greater potential binding epitome than the comparatively limited repertoire of binding epitopes comprised of simple oligosaccharide motifs available in humans⁴².

[0142] We therefore sought to capture the molecular cues contained in human mucin TRs and enable molecular dissection of these cues. We developed a cell-based platform for display and production of representative mucin TRs with defined O-glycans. We reasoned that most of the features of human mucin TRs could be displayed in shorter segments of 150-200 amino acids, and used a GFP-tagged expression construct design containing representative TRs from different mucins to produce a library of cell membrane and secreted mucin TR reporters in human embryonic kidney (HEK293) cells with distinct programmed O-glycosylation capacities. Strikingly, we found that these mucin TR reporters could readily be produced as highly homogeneous molecules with essentially complete O-glycan occupancies and with distinct O-glycan structures in amounts that enabled us to characterize the simplest reporters by intact mass spectrometry (MS), and hence circumvent the longstanding obstacles with protease digestion and bottom-up analysis of mucins^{14,20}. We demonstrate that the cell-based mucin display can be used to produce and display defined mucin TRs and mucin-like O-glycodomains with custom designed O-glycosylation.

[0143] Availability of the cell-based mucin display platform enabled for the first time detailed analysis of the substrate specificities of microbial glycopeptidases such as the StcE glycoprotease. Moreover, using this platform we were able to demonstrate that StcE cleaved several different types of mucins, but not MUC1 as previously indicated²³. Moreover, we could demonstrate that StcE efficiently cleaves mucin TRs with different types of O-glycans including core1 and core2 O-glycans, but importantly StcE cleavage is blocked by core3 and sialyl-Tn O-glycans found predominantly in the human intestine.

[0144] The mucin display platform is ideal for discovery and exploration of mucin degrading enzymes such as the pathogenic glycoprotease StcE²¹⁻²⁴. EHEC is a food-derived human pathogen able to colonize the colon and cause gastroenteritis and bloody diarrhea. Strains of the O157:H7 serotype carry a large virulence plasmid pO157:H7 that directs secretion of StcE^{21,26}. StcE is predicted to provide EHEC with adherence to the gastrointestinal tract and ability to penetrate through the mucin layers via its impressive mucin degrading properties⁶⁴. StcE cleaves the C1 esterase inhibitor glycoprotein (C1-INH) that contains a highly O-glycosylated mucin-like domain and is required for complement activation²¹. StcE was previously shown to cleave several mucins including MUC1, MUC7 and MUC16^{22,23,25,65}, and the cleavage required O-glycosylation and accommodated complex O-glycan structures²³. The gut microbiome is contained in a network of the gel forming mucin MUC2 that forms the loose outer mucin layer, and a dense inner layer of MUC2 forms a barrier and prevents the microbiota to reach the underlying colonic epithelium^{66,67}. Cleavage of the MUC2 mucin layers by StcE would destroy the important barrier function.

[0145] We used purified TR reporters and those displayed on cells to further explore the fine substrate specificity of recombinant purified StcE glycoprotease and to dissect its reported mucin-binding properties (FIG. 9). First, we found that StcE efficiently cleaved isolated MUC2 and MUC5AC reporters with core2 (HEK293^{WT}) and Tn O-glycans already at low concentrations of 10-40 ng/ml (1:2,500-500, StcE : TR reporter ratio), while the STn glycoform was essentially resistant to cleavage (FIG. 9b and FIG. 10a). Next, we explored the selectivity of StcE with the 20 membrane bound mucin TRs displayed on HEK293^{WT} cells by monitoring loss of the N-terminal FLAG tag by flow cytometry using fluorescent anti-FLAG tag antibodies (FIG. 9a). StcE efficiently cleaved most of the mucin TRs with the notable exception of MUC1 and MUC20, as well as the control TR reporter designed with a single O-glycosite (FIG. 9c and FIGS. 10c, d). Dose-titration analysis in both assays showed low ng/ml cleavage for most mucin TR reporters, while no cleavage of the MUC1 TR reporter was found even at 10 μg/ml (FIGS. 10b, d). StcE was shown previously to cleave the entire MUC1 expressed on cancer cells, but this may be due to cleavage outside the TR region as the proposed StcE cleavage motif (S/T-X-S/T) is absent from the well conserved TRs^{23,27}. Finally, we dissected the effect of O-glycan structures on StcE cleavage using the MUC2 and MUC5AC TR reporters, and found that core1 and core2 O-glycans including Tn are efficiently cleaved, while STn as well as core3 O-glycans efficiently blocked proteolysis (FIG. 9d and FIG. 10e).

[0146] The cell-based mucin display platform presented here offers a unique resource with wide applications and opportunities for discovery and dissection of molecular properties of natural human mucins and other glycoproteins with mucin-domains. The informational cues harbored in mucin TRs with their distinct patterns and structures of O-glycans can be addressed with well-defined molecules in a variety of assay formats. This was illustrated by our use of the mucin display to dissect the fine substrate specificity of the mucin-destroying glycoprotease StcE derived from pathogenic EHEC^{21,22}, demonstrating clear selectivity for both distinct mucin TRs and O-glycoforms, and importantly discovering that the normal core3 O-glycosylation pathway in colon actually inhibits StcE digestion of MUC2.

[0147] Example 3—Analysis of the Tissue Binding Properties of the Glycoprotease StcE

[0148] By close examination of the 3-D structure of StcE²⁴ we noticed that the protein contained a C-terminal domain opposite to the catalytic metalloprotease domain (M66), and we hypothesized that this could have a function for StcE. The small domain is a peptide of approximately 100 amino acids, and by detailed sequence analysis we predicted that this could represent an evolutionarily mobile binding module (here designated X409). To test the potential function of the X409 module we first analyzed if deleting this domain affected the mucin cleaving function of StcE using the cell-based mucin display platform. Surprisingly, we found that StcE without X409 retained its remarkable ability to cleave mucin TRs. We therefore next considered whether the module had a role in the mucin binding properties of StcE, which was previously demonstrated with the catalytically inactivated StcE^{E447D} mutant27. We first tested the wildtype StcE active enzyme in binding to human mucosal tissues, and surprisingly found that wildtype StcE without the inactivating mutation bound mucin producing cells similar to the StcE^{E447D} mutant (FIG. 11c). This suggested that the original proposal that the catalytic unit when inactivated could serve as a substrate binding protein was incorrect²⁷. We then tested the active StcE enzyme without the X409 module and discovered complete loss of binding (FIG. 11c). This suggested that the X409 module functions as a mucin-binding module, and analysis of a fusion protein of the X409 module (GFP fusion with FLAG and HIS tags) surprisingly showed that this module alone exhibited strong binding to mucin producing cells in the gastric and colonic mucosa (FIGS. 11c and 12b ,c). We therefore studied the mucin binding properties of the X409 module with the mucin TR display platform and discovered remarkably selective mucin binding properties for distinct mucins (e.g. MUC5AC, MUC2, MUC21) but no binding to several other mucins (e.g. MUC1) (FIG. 11d). These results are strikingly different from those reported previously at many levels, and it is currently not possible to reconcile the reasons for these contradictions. However, the use of well-defined mucin TR reporters through availability of the cell-based mucin TR display platform, and analysis of the isolated X409 module without additional binding properties provided by the catalytic unit with or without inactivation may in part play a role.

[0149] Detailed analysis of the binding pattern with the mucin TR display suggested that a common feature for X409 binding was a sequence motif of 5-6 clustered O-glycans. To test this hypothesis not only by the cell-based human mucin TRs, we tested isolated commercial animal mucins (BSM, PSM, and OSM) by ELISA. Only PSM is known to contain such long clusters of O-glycans, and X409 exhibited binding only to PSM and not to BSM and asialo OSM (FIG. 13).

[0150] The small X409 peptide module offers a unique molecule for binding to select mucins. We show that a fusion protein comprising X409 can be used to bind gastric and intestinal mucosa, and this offers an elegant way to deliver and retain molecules at such anatomical sites for diagnostic and therapeutic purposes.

[0151] StcE plays a role in adherence of EHEC to the intestinal epithelium by binding mucins^{22,24,28}, and a catalytically inactive mutant of StcE (StcE^{E447D}) exhibits broad binding to mucin producing cells in tissue sections^{27,24}. Examination of the 3-D structure of StcE revealed that the protein contained a C-terminal domain (here designated X409) opposite to the catalytic metalloprotease domain (M66). The X409 module was predicted to be important for the catalytic function of StcE, and we therefore produced a StcE mutant construct without this domain (StcE^{ΔX409}) (FIG. 11b and FIG. 12a). Surprisingly, the StcE^{ΔX409} mutant exhibited unaltered cleavage activity with the MUC2 TR reporter expressed in HEK293^{WT} cells. We then produced a GFP-X409 fusion protein and HIS-tagged X409 and found that these did not have enzymatic activity (FIG. 11b and FIG. 12a). We postulated that therefore, the X409 could potentially represent an evolutionarily mobile binding module. To test the role of the X409 module for the tissue binding properties of StcE we used the StcE^{ΔX409} mutant, and surprisingly found that deletion of X409 completely abrogated the binding properties of StcE observed with both the WT and the E447D mutant (FIG. 11c). Note that the binding of active StcE, inactive StcE^{E447D}, as well as X409 alone fully recapitulated the tissue binding found previously with the inactive StcE^{E447D} mutant^{23,25-27,68}. Interestingly, the StcE/X409 staining appeared to overlap with MUC2 expression in human colon as shown by co-localization of staining with a mAb directed against Tn-MUC2 (PMH1) (FIG. 12b)1. The X409 module displayed strong binding to normal human colon and stomach tissues and colon and stomach cancers. While we found no or low binding to other normal tissues including pancreas and breast, strong binding to the counterpart cancer tissues was observed (FIG. 12c). To further explore the binding properties of the X409 module we tested the cell-based mucin TR display, and this revealed remarkable selective binding to the human mucin MUC5AC and MUC21 TRs as well as MUC2 and MUC3 when these carried core2 O-glycans (FIG. 11d). Importantly, many mucin TRs including MUC1 did not bind (FIG. 11d), showing highly selective binding to gastrointestinal mucins.

[0152] We further tested the affect O-glycan structures on the mucin TRs have on the binding of X409, and surprisingly the strong binding to MUC2 and MUC5AC was only slightly influenced by the O-glycan structures attached to the TRs, although weaker binding to TRs carrying Tn, core3 and especially STn O-glycans was observed (FIG. 11e). These results clearly demonstrate that the X409 module mediates the mucin-binding properties of StcE in striking contrast to previous reports²⁷. However, it is also important to recognize that the catalytic unit of StcE may mediate selective binding to dST O-glycans as previously reported²⁴, and this may obscure the binding results obtained previously with StcE^{E447D}. Interestingly, a recent report described use of the full StcE^{E447D} mutant for affinity isolation of O-glycoproteins, and found that the mutant enzyme enriches not only mucins but also a variety of other O-glycoproteins³⁰. Given that StcE, StcE^{E447D} and X409 alone exhibited the same highly selective tissue binding to mucin producing cells, it is likely that the dST glycan binding properties of the catalytic unit of StcE, previously found with high density of glycans printed on glass slides²⁴, do not contribute substantially to binding to tissues as the mucin producing cells in the normal tissues tested mainly produce more complex core2 and core3 O-glycans. Core3 O-glycosylation is restricted to the gastrointestinal tract in human, and in the mouse MUC2 is mainly glycosylated with core1 and core2 O-glycans that are also commonly found outside the gastrointestinal tract in humans^{12,69,70}. In cancer cells the O-glycosylation process is often altered and cancer cells may predominantly produce core1 O-glycans that may bind the catalytic unit of StcE.

[0153] The unique binding properties of X409 to select mucins independent of the structure of the attached O-glycans (FIGS. 11d,e), is very different from the binding properties found with lectins that primarily bind terminal glycan structures, although some lectins do bind internal motifs in larger glycan structures as in the case of lectins binding to the mannose core of N-glycans⁷¹. Examining the mucin TR sequences that show selective binding to (MUC5AC, MUC5B and MUC21 as well as with lower intensity MUC2 and MUC3) (FIG. 2), revealed one common distinguishing feature being the presence of clusters of 5-7 (S/Tₙ₌₅₋₇) O-glycan motifs. Since the O-glycan structures are not essential for binding, but necessary since X409 does not bind unglycosylated mucin TRs, it is likely that clusters of 5-7 O-glycosites on a mucin peptide compose a unique form of binding site for X409. Longer clusters of such O-glycans are rarely found in human proteins and largely limited to the few identified human mucin TRs studied here⁹. X409 therefore represent a novel class of binding modules that recognize select mucin TRs and require specific peptide sequences and the presence of multiple O-glycans. To test this hypothesis further we used natural isolated animal mucins that are known to contain large O-glycan clusters (porcine submaxillary mucin, PSM), and known not to contain such (bovine submaxillary BSM and ovine submaxillary OSM), and tested binding of X409 by ELISA (FIG. 13).

[0154] The binding affinity of traditional lectins to glycans is typically weak (K_{d}=10⁻³-10⁻⁶ M, mM to μM) in comparison to binding affinity of antibody-antigen interactions that can be <10⁻⁹ M (<nM), although increased binding affinity of lectins to glycans may be observed with multivalent interactions. The unique mucin-binding properties of X409 with select binding to distinct mucins and without select binding to distinct O-glycan structures prompted testing of the binding affinity and mode of binding to a mucin reporter with different defined O-glycans attached (FIG. 22). We chose the MUC1 and MUC5Ac reporters and two glycoforms including the WT glycoform comprised of core2 sialylated O-glycans and the most simple Tn O-glycans. Flow cytometry analysis of X409 binding to cells displaying these mucin reporters showed high binding to MUC5Ac and very low binding to MUC1, and higher binding to WT MUC5Ac than to Tn MUC5Ac (FIG. 11e). Using a microscale thermophoresis (MST) assay with AlexaFluoro647 labeled MBP-X409 and the secreted purified reporters, extremely high affinity binding of X409 to WT MUC5Ac (14 nM) and lower binding to Tn MUC5Ac (37 nM) (FIGS. 22b,c) was demonstrated. In contrast, the binding affinity to MUC1 with the WT glycoform was estimated to be >1,000× lower (2.6 μM) and not measurable for Tn-MUC1. Binding affinity was determined by Monolith MicroScale Thermophoresis (MST) from Nanotemper. Monolith uses MST technology to quantify molecular interactions between a target and ligand by detecting changes in fluorescence intensity while a temperature gradient is applied over time. Mucin TR reporters and the X409 module were fluorescently tagged (GFP) according to the manufacturers protocol, and the binding affinity was automatically determined at the end of each run. The affinity constant (K_{d}) was calculated from a fitted curve plotting normalized fluorescence against concentration of ligand. Analysis of the binding by mass photometry revealed that one molecule of X409 bound to one mucin molecule and confirmed the high affinity binding.

[0155] The high affinity binding properties of X409 to select mucins with elaborated mature O-glycans is unique and dissimilar to traditional lectins and glycan-binding proteins with low affinity. Moreover, the select binding to distinct mucins and not for example MUC1 strongly indicate that X409 has unique binding properties and recognize a motif comprised of the innermost part of multiple O-glycans attached to the mucin protein backbone. A similar high affinity binding to glycosylated mucins have only been described for monoclonal antibodies to the cancer-associated Tn glycoform of MUC1 (Tn-MUC1), which recognize the glycans and part of the protein backbone. Thus, the X409 mucin-binding module represent a new class of non-immunoglobulin binders that have selectivity for distinct glycoproteins and high affinity binding like antibodies while relying on glycans for binding similar to lectins.

[0156] Example 4—The family of X409 mucin-binding modules. The 3-D structure of StcE24 was used to identify the boundaries of the X409 mucin-binding module from Escherichia coli O157:H7 (FIG. 14). The amino acid sequence of the identified X409 mucin-binding module was used to search related sequences Using BlastP⁷³ with default parameters against the non-redundant protein sequence database of the NCBI. Sequences similar to that of the X409 module were identified in a large variety of different types of proteins and strains of bacteria (FIG. 15). Analysis of 60 closely related X409 module sequences revealed highly conserved amino acids and domain features that indicates related functional properties (FIG. 16). Wider analysis of 400 X409-related modules further support the conserved sequence and domain features of the X409 mucin-binding modules (FIG. 17). The X409 module sequence of Escherichia coli O157:H7 StcE protease exhibits between 100% and 65% amino acid sequence identity to related modules found in Zn-metalloproteases with Pfam10462 domains. The X409 module sequence of Escherichia coli O157:H7 StcE exhibits 35-100% amino acid sequence identity with X409 modules found in other bacteria.

[0157] To further validate that the identified X409 related sequences represents genuine functional mucin-binding modules, four predicted X409 modules were selected from the wide range of identified X409 related sequences (FIG. 15-17). The four related X409 modules were derived from:
[0158] Vibrio anaquillarum (Gene Bank accession number AZS25716) with 56% sequence identity to the Escherichia coli O157 StcE X409,
[0159] Aeromonas hydrophilia (accession number QBX76946) with 84% sequence identity to the E. coli O157 StcE X409,
[0160] Shewanella baltica OS223 (accession number ACK48812) with 79% sequence identity to the E. coli StcE X409,
[0161] E. coli (accession number AUM10835) with 80% sequence identity to the E. coli StcE X409.

[0162] Shown in FIG. 23 is flow cytometry analysis of the mucin-binding properties of these four X409 variant sequence modules in comparison to StcE X409. All four modules exhibit strong binding to HEK293 cells displaying the MUC5Ac reporter with different O-glycans similarly to StcE X409 (FIG. 23a). Notable differences is that the variant E. coli (accession number AUM10835) module did not bind to the simplest Tn and STn O-glycoforms, which illustrates that this X409 module has improved selectivity for the mature elaborated O-glycoforms of MUC5Ac compared to other X409 modules.

[0163] Notably, binding to the most immature glycoforms is preferable for example when using the mucin-binding properties of X409 to target or deliver substances to the most nascent mucin layers in mucosal linings. Binding to the immature glycoforms of mucins is for example not preferable when using the mucin-binding properties of X409 to target or deliver substances to mucosal linings such as the gut where bacteria continuously degrade the glycans resulting in appearance of for example Tn glycoforms at the most superficial mucus layers and in shed mucins. Thus, the ability of X409 variants to selectively (StcE X409 and other variants) or exclusive (E. coli X409 accession number AUM10835) is preferable to target deeper mucus layers in the gut mucosa and prevent adherence to the superficial and shed mucin layers. All four modules exhibit selective mucin-binding preference for the mucin MUC5Ac (HEK293 cells displaying the MUC5Ac reporter with core1 T O-glycans) similarly to StcE X409 (FIG. 23b).

[0164] Example 5—Novel families of mucin-binding modules unrelated to the X409 sequence. We next searched for CBM-related modules associated with peptidases. The CBM families that were searched were those listed in the Carbohydrate-Active Enzymes database www.cazy.org;⁷⁵ BlastP⁷³ was used to identify proteins with similarity to representative CBM sequences in the non-redundant protein sequence database of the NCBI using default parameters, followed by the identification of domains related to peptidases using Pfam⁷⁴ using default parameters. This resulted in identification of diverse sequence modules with sequences unrelated to X409, but with similar characteristics of distinct modules positioned N- or C-terminal to predicted peptidase domains (FIGS. 18-21). Testing these modules by immunohistology on human stomach and colon tissue sections revealed different binding patterns than X409, and analysis of the mucin-binding properties by the mucin TR display revealed distinct binding profiles to select mucin TRs different from X409 (FIGS. 18-21).

[0165] A detailed analysis of the mucin-binding properties of the novel modules were performed by flow cytometry with HEK293 cells displaying mucin reporters with three different O-glycan structures (Disialyl-core2, core1 T, and Tn) (FIG. 24-28). StcE X409 exhibits preference for elaborated O-glycans and select mucins, while HC1 (CBM51) shows broader mucin reactivity (including e.g. MUC1) but without reactivity to the Tn O-glycoforms (FIG. 24). HC7 (X408/FN3/CBM5) in contrast shows highly selective binding to MUC5Ac and MUC2 with only limited reactivity with these carrying Tn O-glycans (FIG. 25). HC11 (2×Bacon/CBM32) shows similar mucin preference as HC7 but preference for the core1 T O-glycans structure. HC12 (Bacon/CBM32) shows exclusive binding to the Tn glycoforms of MUC5Ac and MUC2. HC5 (CBM13) shows exclusive binding to the Tn glycoforms as HC12, but with wider binding to different mucins.

[0166] These results clearly demonstrate that unique mucin-binding modules can be identified among X409 unrelated sequences, and that these have different mucin-binding properties with selectivity for different mucins and O-glycan structures. Thus, the X409-related and unrelated mucin-binding modules presented here offers a variety of targeting modules characterized by their unique binding properties for select mucins and O-glycans that are useful for targeting and delivery.

[0167] Example 6—Use of Mucin-binding Modules to Target/Deliver to Mucosal Surfaces

[0168] The mucin-binding modules are valuable for targeting and delivery of substances to mucosal surfaces and the distinct mucin and glycan binding properties of the X409-related and unrelated mucin-binding modules can be used to custom-design and tune targeting to different mucosal surfaces expressing different mucins and O-glycans. The mucin-binding modules can for example be used to target orally delivered substances to the gut mucosa, inhaled substances to the respiratory mucosa, and topically administered substances to for example the vaginal and nasal lining mucosa. Preferable substances for delivery to mucosal surfaces include bioactive peptides including peptide hormones, small molecule drugs, enzymes, vaccine compositions, RNA and DNA. Delivery of enzymes may include therapeutic enzymes, for example digestive enzymes needed following surgical removal of pancreas, and enzymes used for improving feed digestion and uptake of nutrients.

[0169] The mucin-binding modules are used in construction of conjugates, complexes and lipid particles where the mucin-binding module is chemically linked, complexed with, adsorbed to, or incorporated into for example lipid particles. For example by chemical conjugation of a lipid moiety to the mucin-binding module this lipid modified module is inserted into lipid particles that may contain substances, and such coated particles adhere to and are retained at the mucosal surface.

[0170] The mucin-binding modules are used in chimeric fusion protein designs where the mucin-binding module is added to a bioactive protein, such as therapeutic protein, bioactive peptide, or enzyme, by recombinant gene technologies to for example mediate binding to the mucosa and enhance residence time, biodistribution, and bioactive effects. The mucin-binding modules are for example used to enhance efficiency of enzymes like proteases, lipases, phytases, amylase, xylanases, β-Glucanases, α-Galactosidases, mannanases, cellulases, hemicellulases, and pectinases.

[0171] One example of delivery of fusion protein drug is protein sequences built on a rigid alpha-helicoidal HEAT-like protein sequences (αReps) that recognize the SARS-COV-2 spike receptor ACE2 binding domain and neutralize virus infection. Installation of such αReps in the nasal cavity before or during infections effectively reduce the replication of a SARS-COV-2 strain in the nasal epithelium in hamsters. The αRep protein localize to the surface mucosa and is detectable for 0-30 min by immunohistological analysis using antibodies to tags, but at 60 min the protein is barely detectable. By introducing X409 to the αRep protein the chimeric fusion protein will remain detectable at the surface considerably longer (for example up to 6 hours) after nasal instillation and thereby provide longer bioactivity and inhibition of viral infection. For example the αRep F9-C2 protein or X409 fusion protein hereof may be given as a prophylactic to limit SARS-COV-2 infection in vivo. Syrian golden hamsters that reflect the infection in human may be pretreated with for example 0.6 mg of the proteins distributed between the two nostrils 1h prior to infection with SARS-COV-2, and the presence of infiltrated αReps on the surface epithelium layer will be observed indicating an efficient absorption of the molecule.

[0172] The X409 mucin-binding module is further useful for improving mucosal vaccine delivery and effectiveness. Mucosal vaccine formulations are dependent on uptake and presentation by resident mucosal innate immune cells and antigen presenting cells, and topical or inhaled (for example by spray) formulations of vaccines are improved by extending their residence time at the mucosal surface. The X409 mucin-binding module is useful to attach by covalent or non-covalent methods to a vaccine formulation or in chimeric fusion protein designs of vaccines comprising for example recombinant proteins or included in the coding region of RNA and DNA vaccine designs to improve adhesion to oral, nasal and other respiratory mucosal surfaces and significantly enhance residence time and effectiveness. The X409 module may be incorporated in RNA and DNA vaccine designs by introducing the coding region for X409 as outlined in this invention in the design (for example before, after, or separate) to the coding region for the protein immunogen of interest. The X409 module may also be conjugated and/or incorporated in the delivery vehicle for mucosal RNA and DNA vaccine formulations to allow the formulation to adhere and reside for extended periods at the mucosal surface for effective delivery of vaccines. The X409 module may also be used for protein, glycoprotein and polysaccharide vaccines by conjugating, incorporating and/or fusing the X409 module to recombinant vaccines in order to enhance mucosal adhesions and effectiveness.

### SEQUENCE HEADERS Included as Clear Text

[0173] <110> University of Copenhagen

[0174] <120> PEPTIDES WITH MUCIN-BINDING PROPERTIES

[0175] <130> P77084EP

[0176] <160> 5

[0177] <170> BISSAP 1.3.6

[0178] <210> 1

[0179] <211> 93

[0180] <212> PRT

[0181] <213>Escherichia coli

[0182] <223> X409 module of StcE

[0183] <210> 2

[0184] <211> 153

[0185] <212> PRT

[0186] <213> Clostridium perfringens

[0187] <223> HC1 CBM51

[0188] <210> 3

[0189] <211> 276

[0190] <212> PRT

[0191] <213> Bacillus cereus

[0192] <223> HC7 X408-FN3-CBM5 of K8

[0193] <210> 4

[0194] <211> 336

[0195] <212> PRT

[0196] <213> Bacteroides fragilis

[0197] <223> HC11 Bacon-Bacon-CBM32

[0198] <210> 5

[0199] <211> 237

[0200] <212> PRT

[0201] <213> Bacteroides fragilis

[0202] <223> HC12 Bacteroides thetaiotaomicron

### REFERENCES CITED

[0203] 1. Hansson, G. C. Mucus and mucins in diseases of the intestinal and respiratory tracts. J. Intern. Med. 285, 479-490 (2019).

[0204] 2. Werlang, C., Cárcarmo-Oyarce, G. & Ribbeck, K. Engineering mucus to study and influence the microbiome. Nat Rev Mater 4, 134-145 (2019).

[0205] 3. Sonnenburg, J. L., Angenent, L. T. & Gordon, J. I. Getting a grip on things: how do communities of bacterial symbionts become established in our intestine? Nat. Immunol. 5, 569-573 (2004).

[0206] 4. McLoughlin, K., Schluter, J., Rakoff-Nahoum, S., Smith, A. L. & Foster, K. R. Host Selection of Microbiota via Differential Adhesion. Cell Host Microbe 19, 550-559 (2016).

[0207] 5. Johansson, M. E. V., Sjövall, H. & Hansson, G. C. The gastrointestinal mucus system in health and disease. Nat Rev Gastroenterol Hepatol 10, 352-361 (2013).

[0208] 6. Link, T. et al. Bioprocess development for the production of a recombinant MUC1 fusion protein expressed by CHO-K1 cells in protein-free medium. Journal of Biotechnology 110, 51-62 (2004).

[0209] 7. Corfield, A. P. Mucins: a biologically relevant glycan barrier in mucosal protection. Biochim. Biophys. Acta 1850, 236-252 (2015).

[0210] 8. Marcos-Silva, L. et al. Characterization of binding epitopes of CA125 monoclonal antibodies. Journal of Proteome Research 13, 3349-3359 (2014).

[0211] 9. Steentoft, C. et al. Precision mapping of the human O-GalNAc glycoproteome through SimpleCell technology. EMBO J. 32, 1478-1488 (2013).

[0212] 10. Lang, T., Hansson, G. C. & Samuelsson, T. Gel-forming mucins appeared early in metazoan evolution. Proceedings of the National Academy of Sciences 104, 16209-16214 (2007).

[0213] 11. Thornton, D. J., Rousseau, K. & McGuckin, M. A. Structure and function of the polymeric mucins in airways mucus. Annu Rev Physiol 70, 459-486 (2008).

[0214] 12. Hansson, G. C. Mucins and the Microbiome. Annu. Rev. Biochem. 89, 769-793 (2020).

[0215] 13. Liu, J. et al. SEDDS for intestinal absorption of insulin: Application of Caco-2 and Caco-2/HT29 co-culture monolayers and intra-jejunal instillation in rats. Int J Pharm 560, 377-384 (2019).

[0216] 14. Levery, S. B. et al. Advances in mass spectrometry driven O-glycoproteomics. Biochim. Biophys. Acta 1850, 33-42 (2015).

[0217] 15. Ali, L. et al. The O-glycomap of lubricin, a novel mucin responsible for joint lubrication, identified by site-specific glycopeptide analysis. Mol. Cell Proteomics 13, 3396-3409 (2014).

[0218] 16. Khoo, K. H. Advances toward mapping the full extent of protein site-specific O-GalNAc glycosylation that better reflects underlying glycomic complexity. Curr. Opin. Struct. Biol. 56, 146-154 (2019).

[0219] 17. Goletz, S. et al. A sequencing strategy for the localization of O-glycosylation sites of MUC1 tandem repeats by PSD-MALDI mass spectrometry. Glycobiology 7, 881-896 (1997).

[0220] 18. Hanisch, F. G., Green, B. N., Bateman, R. & Peter-Katalinić, J. Localization of O-glycosylation sites of MUC1 tandem repeats by QTOF ESI mass spectrometry. J Mass Spectrom 33, 358-362 (1998).

[0221] 19. Kinarsky, L. et al. Conformational studies on the MUC1 tandem repeat glycopeptides: implication for the enzymatic O-glycosylation of the mucin protein core. Glycobiology 13, 929-939 (2003).

[0222] 20. Ali, L. et al. The O-glycomap of lubricin, a novel mucin responsible for joint lubrication, identified by site-specific glycopeptide analysis. Mol. Cell Proteomics 13, 3396-3409 (2014).

[0223] 21. Lathem, W. W. et al. StcE, a metalloprotease secreted by Escherichia coli O157:H7, specifically cleaves C1 esterase inhibitor. Mol. Microbiol. 45, 277-288 (2002).

[0224] 22. Grys, T. E., Siegel, M. B., Lathem, W. W. & Welch, R. A. The StcE protease contributes to intimate adherence of enterohemorrhagic Escherichia coli O157:H7 to host cells. Infect. Immun. 73, 1295-1303 (2005).

[0225] 23. Malaker, S. A. et al. The mucin-selective protease StcE enables molecular and functional analysis of human cancer-associated mucins. Proc. Natl. Acad. Sci. U.S.A. 116, 7278-7287 (2019).

[0226] 24. Yu, A. C. Y., Worrall, L. J. & Strynadka, N. C. J. Structural insight into the bacterial mucinase StcE essential to adhesion and immune evasion during enterohemorrhagic E. coli infection. Structure 20, 707-717 (2012).

[0227] 25. Shon, D. J. et al. An enzymatic toolkit for selective proteolysis, detection, and visualization of mucin-domain glycoproteins. Proc. Natl. Acad. Sci. U.S.A. 117, 21299-21307 (2020).

[0228] 26. Grys, T. E., Walters, L. L. & Welch, R. A. Characterization of the StcE protease activity of Escherichia coli O157:H7. J. Bacteriol. 188, 4646-4653 (2006).

[0229] 27. Walsham, A. D. S. et al. Lactobacillus reuteri Inhibition of Enteropathogenic Escherichia coli Adherence to Human Intestinal Epithelium. Front Microbiol 7, 244 (2016).

[0230] 28. Malaker, S. A. et al. Revealing the human mucinome. bioRxiv 2021.01.27.428510 (2021). doi:10.1101/2021.01.27.428510

[0231] 29. Kudelka, M. R. et al. Cellular O-Glycome Reporter/Amplification to explore O-glycans of living cells. Nature Methods 7, 618-86 (2015).

[0232] 30. Blixt, O. et al. A high-throughput O-glycopeptide discovery platform for seromic profiling. Journal of Proteome Research 9, 5250-5261 (2010).

[0233] 31. Kramer, J. R., Onoa, B., Bustamante, C. & Bertozzi, C. R. Chemically tunable mucin chimeras assembled on living cells. Proc. Natl. Acad. Sci. U.S.A. 112, 12574-12579 (2015).

[0234] 32. Petrou, G. & Crouzier, T. Mucins as multifunctional building blocks of biomaterials. Biomater Sci 6, 2282-2297 (2018).

[0235] 33. Chen, Y. H. et al. The GAGOme: a cell-based library of displayed glycosaminoglycans. Nature Methods 15, 881-888 (2018).

[0236] 34. Narimatsu, Y. et al. An Atlas of Human Glycosylation Pathways Enables Display of the Human Glycome by Gene Engineered Cells. Mol. Cell 75, 394-407.e5 (2019).

[0237] 35. Genetic glycoengineering in mammalian cells. J. Biol. Chem. 100448 (2021). doi:10.1016/j.jbc.2021.100448

[0238] 36. Büll, C., Joshi, H. J., Clausen, H. & Narimatsu, Y. Cell-Based Glycan Arrays—A Practical Guide to Dissect the Human Glycome. STAR Protocols 1, 100017 (2020).

[0239] 37. Cohen, M. & Varki, A. Modulation of glycan recognition by clustered saccharide patches. Int Rev Cell Mol Biol 308, 75-125 (2014).

[0240] 38. Varki, A. Selectin ligands. Proceedings of the National Academy of Sciences 91, 7390-7397 (1994).

[0241] 39. Rillahan, C. D. & Paulson, J. C. Glycan microarrays for decoding the glycome. Annu. Rev. Biochem. 80, 797-823 (2011).

[0242] 40. Cummings, R. D. The repertoire of glycan determinants in the human glycome. Molecular BioSystems 5, 1087-1104 (2009).

[0243] 41. Blixt, O. et al. Printed covalent glycan array for ligand profiling of diverse glycan binding proteins. Proceedings of the National Academy of Sciences 101, 17033-17038 (2004).

[0244] 42. Cummings, R. D. et al. Sialic Acids and Other Nonulosonic Acids. (2015). doi:10.1101/glycobiology.3e.015

[0245] 43. Schjoldager, K. T., Narimatsu, Y., Joshi, H. J. & Clausen, H. Global view of human protein glycosylation pathways and functions. Nat Rev Mol Cell Biol 21, 729-749 (2020).

[0246] 44. Varki, A. et al. Symbol Nomenclature for Graphical Representations of Glycans. Glycobiology 25, 1323-1324 (2015).

[0247] 45. Huson, D. H. & Scornavacca, C. Dendroscope 3: an interactive tool for rooted phylogenetic trees and networks. Syst Biol 61, 1061-1067 (2012).

[0248] 46. Edgar, R. C. MUSCLE: multiple sequence alignment with high accuracy and high throughput. Nucleic Acids Res. 32, 1792-1797 (2004).

[0249] 47. Gouet, P., Courcelle, E., Stuart, D. I. & Métoz, F. ESPript: analysis of multiple sequence alignments in PostScript. Bioinformatics 15, 305-308 (1999).

[0250] 48. Narimatsu, Y. et al. A validated gRNA library for CRISPR/Cas9 targeting of the human glycosyltransferase genome. Glycobiology 28, 295-305 (2018).

[0251] 49. Lonowski, L. A. et al. Genome editing using FACS enrichment of nuclease-expressing cells and indel detection by amplicon analysis. Nature Protocols 12, 581-603 (2017).

[0252] 50. Pinto, R. et al. Precise integration of inducible transcriptional elements (PrlITE) enables absolute control of gene expression. Nucleic Acids Res. 45, e123-e123 (2017).

[0253] 51. Yang, Z. et al. Fast and sensitive detection of indels induced by precise gene targeting. Nucleic Acids Res. 43, e59-e59 (2015).

[0254] 52. Vakhrushev, S. Y., Dadimov, D. & Peter-Katalinić, J. Software platform for high-throughput glycomics. Anal. Chem. 81, 3252-3260 (2009).

[0255] 53. Ricardo, S. et al. Detection of glyco-mucin profiles improves specificity of MUC16 and MUC1 biomarkers in ovarian serous tumours. Mol Oncol 9, 503-512 (2015).

[0256] 54. Varki, A. Biological roles of glycans. Glycobiology 27, 3-49 (2017).

[0257] 55. Palma, A. S., Feizi, T., Childs, R. A., Chai, W. & Liu, Y. The neoglycolipid (NGL)-based oligosaccharide microarray system poised to decipher the meta-glycome. Curr Opin Chem Biol 18, 87-94 (2014).

[0258] 56. Hollingsworth, M. A. & Swanson, B. J. Mucins in cancer: protection and control of the cell surface. Nat. Rev. Cancer 4, 45-60 (2004).

[0259] 57. Narimatsu, Y. et al. Exploring Regulation of Protein O-Glycosylation in Isogenic Human HEK293 Cells by Differential O-Glycoproteomics. Mol. Cell Proteomics 18, 1396-1409 (2019).

[0260] 58. Steentoft, C. et al. Mining the O-glycoproteome using zinc-finger nuclease-glycoengineered SimpleCell lines. Nature Methods 8, 977-982 (2011).

[0261] 59. Burchell, J., Taylor-Papadimitriou, J., Boshell, M., Gendler, S. & Duhig, T. A short sequence, within the amino acid tandem repeat of a cancer-associated mucin, contains immunodominant epitopes. Int. J. Cancer 44, 691-696 (1989).

[0262] 60. Tarp, M. A. et al. Identification of a novel cancer-specific immunodominant glycopeptide epitope in the MUC1 tandem repeat. Glycobiology 17, 197-209 (2007).

[0263] 61. Reis, C. A. et al. Development and characterization of an antibody directed to an alpha-N-acetyl-D-galactosamine glycosylated MUC2 peptide. Glycoconj. J. 15, 51-62 (1998).

[0264] 62. Remmers, N. et al. Aberrant expression of mucin core proteins and o-linked glycans associated with progression of pancreatic cancer. Clin. Cancer Res. 19, 1981-1993 (2013).

[0265] 63. Marcos, N. T. et al. Role of the Human ST6GalNAc-I and ST6GaINAc-II in the Synthesis of the Cancer-Associated Sialyl-Tn Antigen. Cancer Res. 64, 7050-7057 (2004).

[0266] 64. Sewell, R. et al. The ST6GaINAc-I sialyltransferase localizes throughout the Golgi and is responsible for the synthesis of the tumor-associated sialyl-Tn O-glycan in human breast cancer. J. Biol. Chem. 281, 3586-3594 (2006).

[0267] 65. Lathem, W. W., Bergsbaken, T., Witowski, S. E., Perna, N. T. & Welch, R. A. Acquisition of stcE, a C1 esterase inhibitor-specific metalloprotease, during the evolution of Escherichia coliO157:H7. J. Infect. Dis. 187, 1907-1914 (2003).

[0268] 66. Szabady, R. L., Welch, R. A. Handbook of Proteolytic Enzymes Vol.3 Ch 286 (Academic Press, 30 Oct. 2012).

[0269] 67. Szabady, R. L., Lokuta, M. A., Walters, K. B., Huttenlocher, A. & Welch, R. A. Modulation of neutrophil function by a secreted mucinase of Escherichia coli O157:H7. PLOS Pathog. 5, e1000320 (2009).

[0270] 68. Johansson, M. E. V. et al. The inner of the two Muc2 mucin-dependent mucus layers in colon is devoid of bacteria. Proc. Natl. Acad. Sci. U.S.A. 105, 15064-15069 (2008).

[0271] 69. Johansson, M. E. V., Larsson, J. M. H. & Hansson, G. C. The two mucus layers of colon are organized by the MUC2 mucin, whereas the outer layer is a legislator of host-microbial interactions. Proc. Natl. Acad. Sci. U.S.A. 108 Suppl 1, 4659-4665 (2011).

[0272] 70. Holmén Larsson, J. M., Thomsson, K. A., Rodriguez-Piñeiro, A. M., Karlsson, H. & Hansson, G. C. Studies of mucus in mouse stomach, small intestine, and colon. III. Gastrointestinal Muc5ac and Muc2 mucin O-glycan patterns reveal a regiospecific distribution. Am. J. Physiol. Gastrointest. Liver Physiol. 305, G357-63 (2013).

[0273] 71. Bergstrom, K. et al. Core 1- and 3-derived O-glycans collectively maintain the colonic mucus barrier and protect against spontaneous colitis in mice. Mucosal Immunol 10, 91-103 (2017).

[0274] 72. Sharon, N. Lectins: carbohydrate-specific reagents and biological recognition molecules. J. Biol. Chem. 282, 2753-2764 (2007).

[0275] 73. Altschul, S. F. et al. Gapped BLAST and PSI-BLAST: a new generation of protein database search programs. Nucleic Acids Res. 25, 3389-3402 (1997).

[0276] 74. El-Gebali, S. et al. The Pfam protein families database in 2019. Nucleic Acids Res. 47, D427-D432 (2019).

[0277] 75. Lombard, V., Golaconda Ramulu, H., Drula, E., Coutinho, P. M. & Henrissat, B. The carbohydrate-active enzymes database (CAZy) in 2013. Nucleic Acids Res. 42, D490-5 (2014).

### Items X

[0278] X1. A mucin-binding targeting agent comprising an isolated peptide selected from the group comprising

[0279] X409 peptide according to SEQ ID NO: 1,

[0280] HC1 CBM51 peptide according to SEQ ID NO: 2,

[0281] HC7 X408-FN3-CBM5 peptide according to SEQ ID NO:3,

[0282] HC11 Bacon-Bacon-CBM32 peptide according to SEQ ID NO: 4, and

[0283] HC12 Bacteroides thetaiotaomicron peptide according to SEQ ID NO: 5;

[0284] or a mucin-binding targeting agent having 80% sequence identity or more to any one of SEQ ID NO: 1 to 5.

[0285] X2. The mucin-binding targeting agent according to item X1 wherein the isolated peptide has a sequence identity of 95% or more to any one of SEQ ID NO:1 to 5.

[0286] X3. The mucin-binding targeting agent according to any one of items X1 or X2 wherein the peptide is catalytically inactive against mucins.

[0287] X4. The mucin-binding targeting agent according to any one of items X1 to X3 wherein the mucin to which the mucin-targeting agent binds is one or more of MUC2, MUC5AC, MUC5B, and MUC21.

[0288] X5. The mucin-binding targeting agent according to any one of items X1 to X4 further comprising a binding moiety.

[0289] X6. The mucin-binding targeting agent according to any one of items X1 to X5 further comprising a payload.

[0290] X7. The mucin-binding targeting agent according to items X5 or X6 wherein the payload is attached to the agent via the binding moiety.

[0291] X8. The mucin-binding targeting agent according to any one of items X5 to X7 wherein the binding moiety is selected from the group comprising esters, lipid anchors, biotin, streptavidin, antibodies, nanobodies, and peptide linkers.

[0292] X9. The mucin-binding targeting agent according to any one of items X6 to X8, wherein the payload is selected from the group comprising a therapeutic agent, a detectable marker, nanoparticle, liposome, vesicle and a stain.

[0293] X10. The mucin-binding targeting agent according to any of items X1-X9 for use as a medicament.

[0294] X11. A composition comprising the mucin-binding targeting agent according to any of items X1-X10.

[0295] X12. The composition according to item X11, wherein the composition is a pharmaceutical dosage form further comprising a pharmaceutically acceptable excipient and/or a pharmaceutically acceptable carrier.

[0296] X13. The mucin-binding targeting agent according to any of items X1-X10 for use in the treatment of a disease, illness, or disorder in a subject, wherein the disease, illness, or disorder is selected from the group of metabolic, endocrine, inflammatory, immunological diseases, illnesses, or disorders, or is a cancer or a neoplasia.

[0297] X14. A method of delivery of a payload to a tissue in a subject, said tissue expressing one or more of MUC2, MUCSAC, MUC5B, and MUC21, said method comprising administering to the subject a pharmaceutical composition comprising a mucin-binding targeting agent comprising an isolated X409 peptide according to SEQ ID NO: 1;

[0298] HC1 CBM51 peptide according to SEQ ID NO: 2;

[0299] HC7 X408-FN3-CBM5 peptide according to SEQ ID NO:3;

[0300] HC11 Bacon-Bacon-CBM32 peptide according to SEQ ID NO: 4; and

[0301] HC12 Bacteroides thetaiotaomicron peptide according to SEQ ID NO: 5;

[0302] or a mucin-binding targeting agent comprising a sequence having 80% sequence identity to any one of SEQ ID NO: 1 to 5, and a payload bound to said peptide.

[0303] X15. A method of preparing a mucin-binding targeting agent, the method comprising the step of providing an isolated

[0304] X409 peptide according to SEQ ID NO: 1;

[0305] HC1 CBM51 peptide according to SEQ ID NO: 2;

[0306] HC7 X408-FN3-CBM5 peptide according to SEQ ID NO:3;

[0307] HC11 Bacon-Bacon-CBM32 peptide according to SEQ ID NO: 4; and

[0308] HC12 Bacteroides thetaiotaomicron peptide according to SEQ ID NO: 5;

[0309] or a mucin-binding targeting agent having 80% sequence identity to any one of SEQ ID NO: 1 to 5.

### Items

[0310] 1. A mucin-binding targeting agent comprising an isolated X409 peptide according to SEQ ID NO: 1 or a sequence having 65% sequence identity or more thereto.

[0311] 2. A mucin-binding targeting agent comprising an isolated X409 peptide according to SEQ ID NO: 1 or a sequence having 75% sequence identity or more thereto.

[0312] 3. A mucin-binding targeting agent comprising an isolated X409 peptide according to SEQ ID NO: 1 or a sequence having 80% sequence identity or more thereto.

[0313] 4. A mucin-binding targeting agent comprising an isolated X409 peptide according to SEQ ID NO: 1 or a sequence having 85% sequence identity or more thereto.

[0314] 5. A mucin-binding targeting agent comprising an isolated X409 peptide according to SEQ ID NO: 1 or a sequence having 90% sequence identity or more thereto.

[0315] 6. A mucin-binding targeting agent comprising an isolated X409 peptide according to SEQ ID NO: 1 or a sequence having 95% sequence identity or more thereto.

[0316] 7. A mucin-binding targeting agent comprising an isolated X409 peptide according to SEQ ID NO: 1 or a sequence having 96% sequence identity or more thereto.

[0317] 8. A mucin-binding targeting agent comprising an isolated X409 peptide according to SEQ ID NO: 1 or a sequence having 97% sequence identity or more thereto.

[0318] 9. A mucin-binding targeting agent comprising an isolated X409 peptide according to SEQ ID NO: 1 or a sequence having 98% sequence identity or more thereto.

[0319] 10 A mucin-binding targeting agent comprising an isolated X409 peptide according to SEQ ID NO: 1 or a sequence having 99% sequence identity or more thereto.

[0320] 11. A mucin-binding targeting agent comprising an isolated HC1 CBM51 peptide according to SEQ ID NO: 2 or a sequence having 65% sequence identity or more thereto.

[0321] 12. A mucin-binding targeting agent comprising an isolated HC1 CBM51 peptide according to SEQ ID NO: 2 or a sequence having 75% sequence identity or more thereto.

[0322] 13. A mucin-binding targeting agent comprising an isolated HC1 CBM51 peptide according to SEQ ID NO: 2 or a sequence having 80% sequence identity or more thereto.

[0323] 14. A mucin-binding targeting agent comprising an isolated HC1 CBM51 peptide according to SEQ ID NO: 2 or a sequence having 85% sequence identity or more thereto.

[0324] 15. A mucin-binding targeting agent comprising an isolated HC1 CBM51 peptide according to SEQ ID NO: 2 or a sequence having 90% sequence identity or more thereto.

[0325] 16. A mucin-binding targeting agent comprising an isolated HC1 CBM51 peptide according to SEQ ID NO: 2 or a sequence having 95% sequence identity or more thereto.

[0326] 17. A mucin-binding targeting agent comprising an isolated HC1 CBM51 peptide according to SEQ ID NO: 2 or a sequence having 96% sequence identity or more thereto.

[0327] 18. A mucin-binding targeting agent comprising an isolated HC1 CBM51 peptide according to SEQ ID NO: 2 or a sequence having 97% sequence identity or more thereto.

[0328] 19. A mucin-binding targeting agent comprising an isolated HC1 CBM51 peptide according to SEQ ID NO: 2 or a sequence having 98% sequence identity or more thereto.

[0329] 20 A mucin-binding targeting agent comprising an isolated HC1 CBM51 peptide according to SEQ ID NO: 2 or a sequence having 99% sequence identity or more thereto.

3:
31. A mucin-binding targeting agent comprising an isolated HC7 X408-FN3-CBM5 peptide according to SEQ ID NO: 3 or a sequence having 65% sequence identity or more thereto.

[0330] 32. A mucin-binding targeting agent comprising an isolated HC7 X408-FN3-CBM5 peptide according to SEQ ID NO: 3 or a sequence having 75% sequence identity or more thereto.

[0331] 43. A mucin-binding targeting agent comprising an isolated HC7 X408-FN3-CBM5 peptide according to SEQ ID NO: 3 or a sequence having 80% sequence identity or more thereto.

[0332] 44. A mucin-binding targeting agent comprising an isolated HC7 X408-FN3-CBM5 peptide according to SEQ ID NO: 3 or a sequence having 85% sequence identity or more thereto.

[0333] 45. A mucin-binding targeting agent comprising an isolated HC7 X408-FN3-CBM5 peptide according to SEQ ID NO: 3 or a sequence having 90% sequence identity or more thereto.

[0334] 46. A mucin-binding targeting agent comprising an isolated HC7 X408-FN3-CBM5 peptide according to SEQ ID NO: 3 or a sequence having 95% sequence identity or more thereto.

[0335] 47. A mucin-binding targeting agent comprising an isolated HC7 X408-FN3-CBM5 peptide according to SEQ ID NO: 3 or a sequence having 96% sequence identity or more thereto.

[0336] 48. A mucin-binding targeting agent comprising an isolated HC7 X408-FN3-CBM5 peptide according to SEQ ID NO: 3 or a sequence having 97% sequence identity or more thereto.

[0337] 49. A mucin-binding targeting agent comprising an isolated HC7 X408-FN3-CBM5 peptide according to SEQ ID NO: 3 or a sequence having 98% sequence identity or more thereto.

[0338] 50. A mucin-binding targeting agent comprising an isolated HC7 X408-FN3-CBM5 peptide according to SEQ ID NO: 3 or a sequence having 99% sequence identity or more thereto.

4:

[0339] 51. A mucin-binding targeting agent comprising an isolated HC11 BACON-BACON-CBM32 peptide according to SEQ ID NO: 4 or a sequence having 65% sequence identity or more thereto.

[0340] 52. A mucin-binding targeting agent comprising an isolated HC11 BACON-BACON-CBM32 peptide according to SEQ ID NO: 4 or a sequence having 75% sequence identity or more thereto.

[0341] 53. A mucin-binding targeting agent comprising an isolated HC11 BACON-BACON-CBM32 peptide according to SEQ ID NO: 4 or a sequence having 80% sequence identity or more thereto.

[0342] 54. A mucin-binding targeting agent comprising an isolated HC11 BACON-BACON-CBM32 peptide according to SEQ ID NO: 4 or a sequence having 85% sequence identity or more thereto.

[0343] 55. A mucin-binding targeting agent comprising an isolated HC11 BACON-BACON-CBM32 peptide according to SEQ ID NO: 4 or a sequence having 90% sequence identity or more thereto.

[0344] 56. A mucin-binding targeting agent comprising an isolated HC11 BACON-BACON-CBM32 peptide according to SEQ ID NO: 4 or a sequence having 95% sequence identity or more thereto.

[0345] 57. A mucin-binding targeting agent comprising an isolated HC11 BACON-BACON-CBM32 peptide according to SEQ ID NO: 4 or a sequence having 96% sequence identity or more thereto.

[0346] 58. A mucin-binding targeting agent comprising an isolated HC11 BACON-BACON-CBM32 peptide according to SEQ ID NO: 4 or a sequence having 97% sequence identity or more thereto.

[0347] 59. A mucin-binding targeting agent comprising an isolated HC11 BACON-BACON-CBM32 peptide according to SEQ ID NO: 4 or a sequence having 98% sequence identity or more thereto.

[0348] 60. A mucin-binding targeting agent comprising an isolated HC11 BACON-BACON-CBM32 peptide according to SEQ ID NO: 4 or a sequence having 99% sequence identity or more thereto.

[0349] 61. A mucin-binding targeting agent comprising an isolated HC12 BACTEROIDES THETAIOTAOMICRON peptide according to SEQ ID NO: 5 or a sequence having 65% sequence identity or more thereto.

[0350] 62. A mucin-binding targeting agent comprising an isolated HC12 BACTEROIDES THETAIOTAOMICRON peptide according to SEQ ID NO: 5 or a sequence having 75% sequence identity or more thereto.

[0351] 63. A mucin-binding targeting agent comprising an isolated HC12 BACTEROIDES THETAIOTAOMICRON peptide according to SEQ ID NO: 5 or a sequence having 80% sequence identity or more thereto.

[0352] 64. A mucin-binding targeting agent comprising an isolated HC12 BACTEROIDES THETAIOTAOMICRON peptide according to SEQ ID NO: 5 or a sequence having 85% sequence identity or more thereto.

[0353] 65. A mucin-binding targeting agent comprising an isolated HC12 BACTEROIDES THETAIOTAOMICRON peptide according to SEQ ID NO: 5 or a sequence having 90% sequence identity or more thereto.

[0354] 66. A mucin-binding targeting agent comprising an isolated HC12 BACTEROIDES THETAIOTAOMICRON peptide according to SEQ ID NO: 5 or a sequence having 95% sequence identity or more thereto.

[0355] 67. A mucin-binding targeting agent comprising an isolated HC12 BACTEROIDES THETAIOTAOMICRON peptide according to SEQ ID NO: 5 or a sequence having 96% sequence identity or more thereto.

[0356] 68. A mucin-binding targeting agent comprising an isolated HC12 BACTEROIDES THETAIOTAOMICRON peptide according to SEQ ID NO: 5 or a sequence having 97% sequence identity or more thereto.

[0357] 69. A mucin-binding targeting agent comprising an isolated HC12 BACTEROIDES THETAIOTAOMICRON peptide according to SEQ ID NO: 5 or a sequence having 98% sequence identity or more thereto.

[0358] 70 A mucin-binding targeting agent comprising an isolated HC12 BACTEROIDES THETAIOTAOMICRON peptide according to SEQ ID NO: 5 or a sequence having 99% sequence identity or more thereto.

[0359] 71. The mucin-binding targeting agent according to items 1 to 70 wherein the peptide binds to one or more mucins of mammalian origin.

[0360] 72. The mucin-binding targeting agent according to any one of items 1 to 71 wherein the peptide binds to one or more mucins of human origin.

[0361] 73. The mucin-binding targeting agent according to any one of items 1 to 72 wherein the peptide is catalytically inactive against mucins.

[0362] 74. The mucin-binding targeting agent according to any one of items 1 to 73 wherein the mucin to which the mucin-targeting agent binds is one or more of MUC2, MUC5AC, MUC5B, and MUC21.

[0363] 75. The mucin-binding targeting agent according to any one of items 1 to 74 further comprising a binding moiety selected from the group comprising a peptide linker, an ester, a lipid anchor, avidin, streptavidin, and biotin.

[0364] 76. The mucin-binding targeting agent according to item 75 wherein the binding moiety is a lipid anchor.

[0365] 77. The mucin-binding targeting agent according to item 75 wherein the binding moiety is peptide linker.

[0366] 78. The mucin-binding targeting agent according to item 75 wherein the binding moiety is an ester.

[0367] 79. The mucin-binding targeting agent according to any one of items 1 to 78 further comprising a payload.

[0368] 80. The mucin-binding targeting agent according to item 79 wherein the payload is attached to the agent via the binding moiety.

[0369] 81. The mucin-binding targeting agent according to any one of items 79 or 80 wherein the payload is covalently attached to the binding moiety.

[0370] 82. The mucin-binding targeting agent according to any one of items 79 to 81, wherein the payload is selected from the group comprising a therapeutic agent, a detectable marker, nanoparticle, a liposome, a vesicle and a stain.

[0371] 83. The mucin-binding targeting agent according to item 82, wherein the payload is a therapeutic agent selected from the group comprising radioisotopes, enzymes, antibodies, receptors, RNA, DNA, proteins, therapeutic peptides, and oligonucleotides.

[0372] 84. The mucin-binding targeting agent according to item 82 wherein the payload is a therapeutic peptide.

[0373] 85. The mucin-binding targeting agent according to any of the preceding items for use as a medicament.

[0374] 86. A composition comprising the mucin-binding targeting agent according to any of the preceding items.

[0375] 87. The composition according to item 86, wherein the composition is a pharmaceutical dosage form further comprising a pharmaceutically acceptable excipient and/or a pharmaceutically acceptable carrier.

[0376] 88. The composition according to item 87 wherein then composition further comprises a shell and/or an enteric coating.

[0377] 89. The mucin-binding targeting agent according to any of the preceding items for use in the treatment of a disease, illness, or disorder in a subject, wherein the disease, illness, or disorder is selected from the group of from the group of inflammatory, immunological, endocrine, or metabolic disorders such as obesity or may be neurological, psychological or psychiatric or mood disorders, or disorders of the nervous system, or sexual disorders including reproductive disorders and disorders of the genital system, neoplastic disorders such as cancers, disorders involving dysfunction of mucous tissue or dysfunction of epithelial tissue, including disorders, diseases, and illnesses of the gastrointestinal tract, nasal disorders, disorders and diseases of the eye.

[0378] 90. The mucin-binding targeting agent according to any of the preceding items, wherein the agent is for oral, rectal, vaginal, buccal, ocular, nasal, or inhalation administration.

[0379] 91. A method of delivery of a payload to a tissue in a subject, said tissue expressing one or more of MUC2, MUC5AC, MUC5B, and MUC21, said method comprising administering to the subject a pharmaceutical composition comprising a mucin-binding targeting agent comprising an isolated peptide according to any one of SEQ ID NO: 1 to 5 or a sequence having 65% or more, such as 70% or more, such as 80% or more, such as 85% or more, such as 90 percent or more, such as 95% or more, such as 96% or more, such as 97% or more, such as 98% or more, such 99% or more, such as 99.5% or more thereto and a payload bound to said polypeptide

[0380] 92. The method according to item 91, wherein the tissue is located in the intestinal tract.

[0381] 93. A method of preparing a mucin-binding targeting agent, the method comprising the step of providing an isolated peptide according to any one of SEQ ID NO: 1 to 5, or a sequence having 65% or more, such as 70% or more, such as 80% or more, such as 85% or more, such as 90 percent or more, such as 95% or more, such as 96% or more, such as 97% or more, such as 98% or more, such 99% or more, such as 99.5% or more thereto.

[0382] 94. The method according to item 93 further comprising the step of providing a binding moiety and linking the binding moiety and the polypeptide.

[0383] 95. The method according to item 93 or 94 wherein the peptide and/or the binding moiety is/are produced recombinantly.

[0384] 96. The method according to any one of items 93 to 95, further comprising a step of attaching a payload to the mucin-binding targeting agent.

[0385] 97. A mucin-binding targeting agent comprising an isolated mucin-binding peptide sequence that binds an O-glycosylated mucin motif comprised of 5 or more consecutive O-glycans, and which targeting agent do not bind to non-glycosylated mucins independent of the O-glycan structures attached.

[0386] 98. The mucin-binding targeting agent according to item 97 further comprising a binding moiety.

[0387] 99. The mucin-binding targeting agent according to item 98 further wherein the binding moiety is selected from the group comprising a peptide linker, an ester, a lipid anchor, avidin, streptavidin, and biotin.

[0388] 100. The mucin-binding targeting agent according to any one of items 97 to 99 further comprising a payload.

[0389] 101. The mucin-binding targeting agent according to item 100 wherein the payload is selected from the group comprising a therapeutic agent, a detectable marker, nanoparticle, a liposome, a vesicle and a stain.

[0390] 102. The mucin-binding targeting agent according to item 101 wherein the payload is a therapeutic agent.

[0391] 103. A DNA sequence encoding any one of the peptides according to SEQ ID NO: 1 to 5 or a sequence having 65% or more, such as 70% or more, such as 80% or more, such as 85% or more, such as 90 percent or more, such as 95% or more, such as 96% or more, such as 97% or more, such as 98% or more, such 99% or more, such as 99.5% or more sequence identity thereto.

1. A mucin-binding targeting agent comprising an isolated peptide comprising
i) a X409 peptide according to SEQ ID NO: 1, or an isolated peptide having 75% sequence identity or more to SEQ ID NO: 1, and
ii) a payload.

2. The mucin-binding targeting agent according to claim 1, wherein the isolated peptide is catalytically inactive against mucins.

3. The mucin-binding targeting agent according to claim 1, wherein the mucin to which the mucin-binding targeting agent binds is one or more of MUC2, MUC5AC, MUC5B, and MUC21.

4. The mucin-binding targeting agent according to claim 1, wherein the binding of the mucin-binding targeting agent to MUC5AC has a dissociation constant of less than 1 μM, such as less than 500 nM, such as less than 250 nM, such as less than 100 nM, preferably less than 50 nM.

5. The mucin-binding targeting agent according to claim 1, wherein the binding of the mucin-binding targeting agent to MUC1 has a dissociation constant of more than 1 μM.

6. The mucin-binding targeting agent according to claim 1, wherein each mucin-binding targeting agent molecule binds only a single mucin molecule.

7. The mucin-binding targeting agent according to claim 1, wherein the isolated peptide is a X409 peptide selected from the group consisting of SEQ ID NO: 1, SEQ ID NO:73, SEQ ID NO: 74, and SEQ ID NO: 135.

8. The mucin-binding targeting agent according to claim 1 further comprising a binding moiety.

9. The mucin-binding targeting agent according to claim 8, wherein the payload is attached to the mucin-binding targeting agent via the binding moiety.

10. The mucin-binding targeting agent according to claim 8, wherein the binding moiety is selected from the group consisting of esters, lipid anchors, biotin, streptavidin, antibodies, nanobodies, and peptide linkers.

11. The mucin-binding targeting agent according to claim 1, wherein the payload is selected from the group consisting of a therapeutic agent, an enzyme, a vaccine, a peptide hormone, a small molecule drug, a detectable marker, nanoparticle, liposome, vesicle and a stain.

12. The mucin-binding targeting agent according to claim 11, wherein the enzyme is selected from the group consisting of proteases, lipases, phytases, amylase, xylanases, β-Glucanases, α-Galactosidases, mannanases, cellulases, hemicellulases, and pectinases.

13. A composition comprising the mucin-binding targeting agent according to claim 1.

14. The composition according to claim 13, wherein the composition is a pharmaceutical dosage form further comprising a pharmaceutically acceptable excipient and/or a pharmaceutically acceptable carrier.

15. The mucin-binding targeting agent according to claim 1 for use as a medicament.

16. The mucin-binding targeting agent according to claim 15 for use in the treatment of a disease, illness, or disorder in a subject, wherein the disease, illness, or disorder is selected from the group of metabolic, endocrine, inflammatory, immunological diseases, illnesses, or disorders, or is a cancer or a neoplasia.

17-103. (canceled)

The application's sequence listing, which the Patent Office published only in electronic form, follows.

SEQUENCE LISTING (1104 sequences)

SEQ ID NO: 1 - protein, 93 aa, Escherichia coli
  X409 module of StcE
EGCIVSVNSGKRYCLPVGQRSGYSLPDWIVGQEVYVDSGAKAKVLLSDWDNLSYNRIGEFVGNVNPADMKKVKAWNGQYLDFSKPRSMRVVYK

SEQ ID NO: 2 - protein, 153 aa, Clostridium perfringens
  HC1 CBM51
NYIFLSDLEYMKSMSNTSWGSIKMDQNISGGKITLNVDGTALQFDKGMGAHATSNLVYDVSNYSQTYSRFTTYVGIDRSQWDKGNGIKVTVSTSNDGKEWKELSVTDILKGNKNAAFIDVDIKGVKYLKLHADDNGANGNDHAVYGSPRIMKS

SEQ ID NO: 3 - protein, 276 aa, Bacillus cereus
  HC7 X408-FN3-CBM5 of K8
DRFAWSMKGIGDFEFAKLDLNKSTEELQVSLIAGTPHNYFDSTYASIKVQDTSGKVVYNKEIYGNTQQNAESKTVPVKVGNFIELTHLEGGERATLTNLDNNKRESFDKKVIYEVTKDGLKKINQIVNPKPDTEAPTQPQGLYASNVASDSVELKWNPSTDNVGVKEYQVLRDGQLIQTVQETKVTDQNLTANKEYKYTVKAVDTAGNISVQSNILTVTTKSQNVTYEKWDPKKAYTKGDKVEYQGKFYEAVQSYQGNGDPTWIFALSLWQPFKLI

SEQ ID NO: 4 - protein, 336 aa, Bacteroides fragilis
  HC11 Bacon-Bacon-CBM32
TSTTLEVAQSAIDFKSDAGTRDIAIVTNADHWTARSDKDWCSVAVNESTLTVNVSGYDGKETREAVIKVTADGLAETVNVRQLGSEPAILISQQIFTVEASGSDIAFDVTTNVSVTITLPEWIKEKPAGTRASEMVTTTHNYIVTANPEDSERTGNITVKEVGGELEALVSVTQKGLGEYESGNLEGIKDDIKVPVESGEASSFQGGSNIDKSFDGDMSTIYHSNWNNAGDHYFPITLTYNFAAGSDMDYLIYYPRTSGPNGNFKEVEIRVKSNANTRGTDEWNTVMTKNFGGTNAAVRVNFPKAQIGVTSVQFIVKSGSGDGQGFAACAEMEFYK

SEQ ID NO: 5 - protein, 237 aa, Bacteroides fragilis
  HC12 Bacteroides thetaiotaomicron
FSISEEYLIQNLDKSSTSVQIPINTSMELAQWSVSYEANWLQCSKQKTAAEGTFLRITVNENTGETKRTANIKVTSTTATYTITVNQYAKGEVIVEGDIKVTPTGGKASEHQEGQDIENTYDGKFSTDGAAPFHTPWGQSAKFPVTLEYYFKGDTEIDYLIYYTRSGNGNFGKVKVYTTTNPDRSDYTLQGEYDFKEQNAPSKVSFSEGIKATGIKFEVLSGLGDFVSCDEMEFYKT

SEQ ID NO: 6 - DNA, 41 bp, Artificial Sequence
  TR constructs with NotI/XhoI and 6His
gcggccgcccatcaccaccatcatcactgatagcgctcgag

SEQ ID NO: 7 - protein, 11 aa, Artificial Sequence
  TR reporter design containing six 11-mer sequences with a single O-glycosylation site
AEAAATPAPAK

SEQ ID NO: 8 - protein, 140 aa, Homo sapiens
  MUC1 reporter construct
APDNKPAPGSTAPPAHGVTSAPDTRPAPGSTAPPAHGVTSAPDTRPAPGSTAPPAHGVTSAPDTRPAPGSTAPPAHGVTSAPDTRPAPGSTAPPAHGVTSAPDTRPAPGSTAPPAHGVTSAPDTRPAPGSTAPPAHGVTS

SEQ ID NO: 9 - protein, 149 aa, Homo sapiens
  MUC2 Reporter construct
PSPPPTSTTTLPPTTTPSPPTTTTTTPPPTTTPSPPITTTTTPPPTTTPSPPISTTTTPPPTTTPSPPTTTPSPPTTTPSPPTTTTTTPPPTTTPSPPTTTPITPPASTTTLPPTTTPSPPTTTTTTPPPTTTPSPPTTTPITPPTSTT

SEQ ID NO: 10 - protein, 152 aa, Homo sapiens
  MUC2 reporter construct
PTQTPTTTPITTTTTVTPTPTPTGTQTPTPTPITTTTTVTPTPTPTGTQTPTSTPITTTTTVTPTPTPTGTQTPTMTPITTTTTVTPTPTPTGTQTPTTTPISTTTTVTPTPTPTGTQTPTSTPITTTTTVTPTPTPTGTQTPTTTPITTAA

SEQ ID NO: 11 - protein, 148 aa, Homo sapiens
  MJC3A Reporter construct
TTEISSHSTPSFSSSTIYSTVSTSTTAISSLPPTSGTMVTSTTMTPSSLSTDIPFTTPTTITHHSVGSTGFLTTATDLTSTFTVSSSSAMSTSVIPSSPSIQNTETSSLVSMTSATTPNVRPTFVSTLSTPTSSLLTTFPATYSFSSS

SEQ ID NO: 12 - protein, 144 aa, Homo sapiens
  MJC3A Reporter construct
MTSATTPNVRPTFVSTLSTPTSSLLTTFPATYSFSSSMSASSAGTTHTESISSPPASTSTLHTTAESTLAPTTTTSFTTSTTMEPPSTTAATTGTGQTTFTSSTATFPETTTPTPTTDMSTESLTTAMTSPPITSSVTSTNTVT

SEQ ID NO: 13 - protein, 151 aa, Homo sapiens
  MJC3A Reporter construct
TTPTPTTDMSTESLTTAMTSPPITSSVTSTNTVTSMTTTTSPPTTTNSFTSLTSMPLSSTPVPSTEVVTSGTINTIPPSILVTTLPTPNASSMTTSETTYPNSPTGPGTNSTTEITYPTTMTETSSTATSLPPTSPLVSTAKTAKTPTTNL

SEQ ID NO: 14 - protein, 135 aa, Homo sapiens
  MJC3A reporter construct
TTTETTSHSTPGFTSSITTTETTSHSTPSFTSSITTTETTSHDTPSFTSSITTSETPSHSTPSSTSLITTTKTTSHSTPSFTSSITTTETTSHSAHSFTSSITTTETTSHNTRSFTSSITTTETNSHSTTSFTSS

SEQ ID NO: 15 - protein, 144 aa, Homo sapiens
  MJC4 reporter construct
PLPVTSPSSASTGHATPLLVTDTSSASTGHATPLPVTDASSVSTDHATSLPVTIPSAASTGHTTPLPVTDTSSASTGQATSLLVTDTSSVSTGDTTPLPVTSTSSASTGHVTPLHVTSPSSASTGHATPLPVTSLSSASTGDTM

SEQ ID NO: 16 - protein, 143 aa, Homo sapiens
  MUC5AC reporter construct
TTSAPTTSTTSAPTTSTISAPTTSTTSATTTSTTSAPTPRRTSAPTTSTISASTTSTTSATTTSTTSATTTSTISAPTTSTTLSPTTSTTSTTITSTTSAPISSTTSTPQTSTTSAPTTSTTSGPGTTSSPVPTTSTTSAPTT

SEQ ID NO: 17 - protein, 141 aa, Homo sapiens
  MUC5B reporter construct
PATSSTATPSSTPGTTWILTKPTTTATTTASTGSTATPTSTLRTAPPPKVLTTTATTPTVTSSKATPSSSPGTATALPALRSTATTPTATSVTPIPSSSLGTTWTRLSQTTTPTATMSTATPSSTPETAHTSTVLTATATT

SEQ ID NO: 18 - protein, 140 aa, Homo sapiens
  MUC5B reporter construct
TTWTRLSQTTTPTATMSTATPSSTPETAHTSTVLTATATTTGATGSVATPSSTPGTAHTTKVPTTTTTGFTATPSSSPGTALTPPVWISTTTTPTTRGSTVTPSSIPGTTHTATVLTTTTTTVATGSMATPSSSTQTSGT

SEQ ID NO: 19 - protein, 140 aa, Homo sapiens; identical to SEQ ID NO: 18
  MUC5B reporter construct

SEQ ID NO: 20 - protein, 130 aa, Homo sapiens
  MUC5B reporter construct
ALTPPVWISTTTTPTTRGSTVTPSSIPGTTHTATVLTTTTTTVATGSMATPSSSTQTSGTPPSLTTTATTITATGSTTNPSSTPGTTPIPPVLTTTATTPAATSNTVTPSSALGTTHTPPVPNTMATTHG

SEQ ID NO: 21 - protein, 122 aa, Homo sapiens
  MUC6 reporter construct
TSATSSRLPTPFTTHSPPTGTTPISSTGPVTATSFQTTTTYPTPSHPHTTLPTHVPSFSTSLVTPSTHTVIIPTHTQMATSASIHSMPTGTIPPPTTIKATGSTHTAPPMTPTTSGTSQSPS

SEQ ID NO: 22 - protein, 87 aa, Homo sapiens
  MUC6 reporter construct
ASIHSMPTGTIPPPTTIKATGSTHTAPPMTPTTSGTSQSPSSFSTAKTSTSLPYHTSSTHHPEVTPTSTTNITPKHTSTGTRTPVAH

SEQ ID NO: 23 - protein, 160 aa, Homo sapiens
  MUC7 reporter construct
PPTPSATTQAPPSSSAPPETTAAPPTPPATTPAPPSSSAPPETTAAPPTPSATTPAPLSSSAPPETTAVPPTPSATTLDPSSASAPPETTAAPPTPSATTPAPPSSPAPQETTAAPITTPNSSPTTLAPDTSETSAAPTHQTTTSVTTQTTTTKQPTSAP

SEQ ID NO: 24 - protein, 89 aa, Homo sapiens
  OVGP1 (MUC9) reporter construct
AMTMTSVGHQSMTPGEKALTPVGHQSVTTGQKTLTSVGYQSVTPGEKTLTPVGHQSVTPVSHQSVSPGGTTMTPVHFQTETLRQNTVAP

SEQ ID NO: 25 - protein, 142 aa, Homo sapiens
  MUC13 reporter construct
TTETATSGPTVAAADTTETNFPETASTTANTPSFPTATSPAPPIISTHSSSTIPTPAPPIISTHSSSTIPIPTAADSESTTNVNSLATSDIITASSPNDGLITMVPSETQSNNEMSPTTEDNQSSGPPTGTALLETSTLNST

SEQ ID NO: 26 - protein, 149 aa, Homo sapiens
  MUC17 reporter construct
LSTTPVDTSTPVTNSTEARSSPTTSEGTSMPTSTPSEGSTPFTSMPVSTMPVVTSEASTLSATPVDTSTPVTTSTEATSSPTTAEGTSIPTSTLSEGTTPLTSIPVSHTLVANSEVSTLSTTPVDSNTPFTTSTEASSPPPTAEGTSMP

SEQ ID NO: 27 - protein, 149 aa, Homo sapiens
  MUC19 reporter construct
VTRTTRSSAGLTGKTGLSAGVTGKTGLSAEVTGTTRLSAGVTGTTGPSPGVTGTTGTPAGVTGTTELSAGVTGKTGLSSEVTETTGLSYGVKRTIGLSAGSTGTSGQSAGVAGTTTLSAEVTGTTRPSAGVTGTTGLSAEVTEITGISA

SEQ ID NO: 28 - protein, 151 aa, Homo sapiens
  MUC20 reporter construct
ESSASSDSPHPVITPSRASESSASSDGPHPVITPSRASESSASSDGPHPVITPSRASESSASSDGPHPVITPSRASESSASSDGPHPVITPSRASESSASSDGPHPVITPSRASESSASSDGPHPVITPSRASESSASSDGPHPVITPSRA

SEQ ID NO: 29 - protein, 149 aa, Homo sapiens
  MUC21 reporter construct
SGASTATNSDSSTTSSGASTATNSDSSTTSSEASTATNSESSTTSSGASTATNSESSTVSSRASTATNSESSTTSSGASTATNSESRTTSNGAGTATNSESSTTSSGASTATNSESSTPSSGAGTATNSESSTTSSGAGTATNSESSTV

SEQ ID NO: 30 - protein, 148 aa, Homo sapiens
  MUC22 reporter construct
GTTTASMAGSETTVSTAGSETTTVSITGTETTMVSAMGSETTTNSTTSSETTVTSTAGSETTTVSTVGSETTTAYTADSETTAASTTGSEMTTVFTAGSETITPSTAGSETTTVSTAGSETTTVSTTGSETTTASTAHSETTAASTMG

SEQ ID NO: 31 - protein, 219 aa, Homo sapiens
  GP1BA reporter construct
PTLGDEGDTDLYDYYPEEDTEGDKVRATRTVVKFPTKAHTTPWGLFYSWSTASLDSQMPSSLHPTQESTKEQTTFPPRWTPNFTLHMESITFSKTPKSTTEPTPSPTTSEPVPEPAPNMTTLEPTPSPTTPEPTSEPAPSPTTPEPTSEPAPSPTTPEPTSEPAPSPTTPEPTPIPTIATSPTILVSATSLITPKSTFLTTTKPVSLLESTKKTIPELD

SEQ ID NO: 32 - protein, 67 aa, Homo sapiens
  Ctrl reporter construct
PAEAAATPAPAKAEAAATPAPAKAEAAATPAPAKAEAAATPAPAKAEAAATPAPAKAEAAATPAPAK

SEQ ID NO: 33 - protein, 16 aa, Homo sapiens
  MUC2TR x 9
PSPPTTTTTTPPPTTT

SEQ ID NO: 34 - protein, 23 aa, Homo sapiens
  MUC2TR x 7
GTQTPTTTPITTTTTVTPTPTPT

SEQ ID NO: 35 - protein, 8 aa, Homo sapiens
  MUC5A x 18
STTSAPTT

SEQ ID NO: 36 - protein, 22 aa, Homo sapiens
  MUC5B x1
PTTTATTTASTGSTATPTSTLR

SEQ ID NO: 37 - protein, 22 aa, Homo sapiens
  MUC6 x1
TSATSSRLPTPFTTHSPPTGTT

SEQ ID NO: 38 - protein, 23 aa, Homo sapiens
  MUC7 x 7
TTAAPPTPSATTPAPPSSSAPPE

SEQ ID NO: 39 - protein, 15 aa, Homo sapiens
  MUC9 x6
GEKTLTPVGHQSVTP

SEQ ID NO: 40 - protein, 10 aa, Homo sapiens
  MUC19 x 15
GVTGTTGLSA

SEQ ID NO: 41 - protein, 20 aa, Homo sapiens
  MUC1 x7
APDTRPAPGSTAPPAHGVTS

SEQ ID NO: 42 - protein, 21 aa, Homo sapiens
  MUC3 x1
TTEISSHSTPSFSSSTIYSTV

SEQ ID NO: 43 - protein, 16 aa, Homo sapiens
  MUC4 x9
PLPVTDTSSASTGHAT

SEQ ID NO: 44 - protein, 16 aa, Homo sapiens
  MUC13 x1
PAPPIISTHSSSTIPT

SEQ ID NO: 45 - protein, 21 aa, Homo sapiens
  MUC17 x3
LSTTPVDTSTPVTTSTEATSS

SEQ ID NO: 46 - protein, 19 aa, Homo sapiens
  MUC20 x8
SESSASSDGPHPVITPSRA

SEQ ID NO: 47 - protein, 15 aa, Homo sapiens
  MUC21 x10
SSGASTATNSESSTT

SEQ ID NO: 48 - protein, 10 aa, Homo sapiens
  MUC22 x15
SETTTVSTAG

SEQ ID NO: 49 - protein, 13 aa, Homo sapiens
  GP1Ba x1
SPTTPEPTSEPAP

SEQ ID NO: 50 - protein, 898 aa, Escherichia coli
  Escherichia coli O157:H7 StcE
MNTKMNERWRTPMKLKYLSCTILAPLAIGVFSATAADNNSAIYFNTSQPINDLQGSLAAEVKFAQSQILPAHPKEGDSQPHLTSLRKSLLLVRPVKADDKTPVQVEARDDNNKILGTLTLYPPSSLPDTIYHLDGVPEGGIDFTPHNGTKKIINTVAEVNKLSDASGSSIHSHLTNNALVEIHTANGRWVRDIYLPQGPDLEGKMVRFVSSAGYSSTVFYGDRKVTLSVGNTLLFKYVNGQWFRSGELENNRITYAQHIWSAELPAHWIVPGLNLVIKQGNLSGRLNDIKIGAPGELLLHTIDIGMLTTPRDRFDFAKDKEAHREYFQTIPVSRMIVNNYAPLHLKEVMLPTGELLTDMDPGNGGWHSGTMRQRIGKELVSHGIDNANYGLNSTAGLGENSHPYVVAQLAAHNSRGNYANGIQVHGGSGGGGIVTLDSTLGNEFSHEVGHNYGLGHYVDGFKGSVHRSAENNNSTWGWDGDKKRFIPNFYPSQTNEKSCLNNQCQEPFDGHKFGFDAMAGGSPFSAANRFTMYTPNSSAIIQRFFENKAVFDSRSSTGFSKWNADTQEMEPYEHTIDRAEQITASVNELSESKMAELMAEYAVVKVHMWNGNWTRNIYIPTASADNRGSILTINHEAGYNSYLFINGDEKVVSQGYKKSFVSDGQFWKERDVVDTREARKPEQFGVPVTTLVGYYDPEGTLSSYIYPAMYGAYGFTYSDDSQNLSDNDCQLQVDTKEGQLRFRLANHRANNTVMNKFHINVPTESQPTQATLVCNNKILDTKSLTPAPEGLTYTVNGQALPAKENEGCIVSVNSGKRYCLPVGQRSGYSLPDWIVGQEVYVDSGAKAKVLLSDWDNLSYNRIGEFVGNVNPADMKKVKAWNGQYLDFSKPRSMRVVYK

SEQ ID NO: 51 - DNA, 282 bp, Escherichia coli
  Escherichia coli 0157:H7 StcE
gagggatgcatcgtgtccgtgaattcaggtaaacgttactgtttgccggttggtcaacggtcaggatatagccttcctgactggattgttgggcaggaagtctatgtcgacagcggggctaaagcgaaagtgctgctttctgactgggataacctgtcctataacaggattggtgagtttgtaggtaatgtgaacccagctgatatgaaaaaagttaaagcctggaacggacagtatttggacttcagtaaacctaggtcaatgagggttgtatataaataa

SEQ ID NO: 52 - protein, 20 aa, Homo sapiens
  Muc1TR
APDTRPAPGSTAPPAHGVTS

SEQ ID NO: 53 - protein, 23 aa, Homo sapiens
  MUC7 TR
PPTPSATTQAPPSSSAPPETTAA

SEQ ID NO: 54 - protein, 20 aa, Homo sapiens
  MUC1 TR reporters after AspN digestion
APDTRPAPGSTAPPAHGVTS

SEQ ID NO: 55 - protein, 1000 aa, Clostridium perfringens
  HC1 Clostridium perfringens LLY_N11
MGVNSVKRKKIVCSILTVCFLSSLFFQNVTVLANENTIENVTSERQEQNNENYIFLSDLEYMKSMSNTSWGSIKMDQNISGGKITLNVDGTALQFDKGMGAHATSNLVYDVSNYSQTYSRFTTYVGIDRSQWDKGNGIKVTVSTSNDGKEWKELSVTDILKGNKNAAFIDVDIKGVKYLKLHADDNGANGNDHAVYGSPRIMKSDYDISSEYLAGIKKVEQYDELIKSKYEINSPITGEYEKLLLQRTFVNRAGFNTLQSVAKLGKKYEDTISWLINNETALKLYVTGGEIEGGSYSNSMKVLADIYEKHKSDFNDTANGDLYLKMAISTSLSHAKDIRLWTGNAQVSDPCTRYEIYKDLYNNGLMAQGGNTELFKNLPVELMRWVTDNKIDDEEINWLVNHALAKKAQGGNYLDAYTYINYTSGFDYNRDKYYDQSKFDEWNNKYNIESLTGYGTKGIHKLWMVFEEGSVCGGLAKTYANLSQVFGMPAAVLGQPGHAATLTYSQNSQGKGIWSIKNDISGWVQSEKGERLPLGWGSKDWDSYYSVSYILLAQKALDDYDNLIKAAYYNYLADVYKNDSEKQIAIYNKALEIQSYNLDSLVGLINAYKLAGNKTSGDYLKLSEKVADGLAFFPLPFVDVMKLIENNVTDDSDKVIFDMLKTKTLKRATAATENDTVQPNACKTMANHLLGQNKIELATFSFDGENAGKIKINDVYSNSSIRWEYSLDGWKAKKETDAKEVTLSKEELEKLNKDQDIQISLVGTSEIYKIDITQYEAPKNLYVNDLENQFRGFNGNLEFSEDGGNTWNKYDSENTRIIGNKKVLVRYLSSGTKMQSEPVEYSFTEDNQPDTRKYIQLKNVSLYKYSSQQNNGDAAALNMIDGNINTGWHNTWAGEKDKYYSVEFDKPRYITSIEYKPSGTNGILKNVDIYTSMDGTQWEKSGEVRNLKNNYDLKVLDLNKPTEAKFVKLQAVNTYGYPNDVFFTGRMLNFFEDISKTNNQ

SEQ ID NO: 56 - protein, 659 aa, Bacillus cereus
  HC7 Bacillus cereus K8
MFNQRTKNGVKKILAITAASTVFSMFGSSISIIEAASAPGVYVTPKNSVSSDIISIDWSPVQTAPYTYWAVHNWNQGGEAGGYAGFQQQSGFDENGKRTLHFAVWDPISSKEAIKAEYVSPTSVASNFGGEGTGLKIQTTYDWKNYNWYRMTMRSWQENGHTKFGQWLKDVSKNQWKLIGIMDFPVPNVTFNYGQTLFQEDWLGNGQDVREARVKNGYGRNISDKKWTSWNTQSIEGQEPLNNNWDGGATSEYLWFKAGGDSRSTIGTGKTFTLNQPSQPEIGKLDYDVKSTYYENEKLNITWQLKDSSTPQFKGKIEIYNNENMTGQPINVINDIKSYQNGISQSISLPTNTYAKIVLTDIFDQTVEKKVKIKNESPNILEGDRFAWSMKGIGDFEFAKLDLNKSTEELQVSLIAGTPHNYFDSTYASIKVQDTSGKVVYNKEIYGNTQQNAESKTVPVKVGNFIELTHLEGGERATLTNLDNNKRESFDKKVIYEVTKDGLKKINQIVNPKPDTEAPTQPQGLYASNVASDSVELKWNPSTDNVGVKEYQVLRDGQLIQTVQETKVTDQNLTANKEYKYTVKAVDTAGNISVQSNILTVTTKSQNVTYEKWDPKKAYTKGDKVEYQGKFYEAVQSYQGNGDPTWIFALSLWQPFKLI

SEQ ID NO: 57 - protein, 939 aa, Bacteroides fragilis
  HC11 Bacteroides fragilis
MKKHLILMISAAIIPLLLYACSAEEERALTSTTLEVAQSAIDFKSDAGTRDIAIVTNADHWTARSDKDWCSVAVNESTLTVNVSGYDGKETREAVIKVTADGLAETVNVRQLGSEPAILISQQIFTVEASGSDIAFDVTTNVSVTITLPEWIKEKPAGTRASEMVTTTHNYIVTANPEDSERTGNITVKEVGGELEALVSVTQKGLGEYESGNLEGIKDDIKVPVESGEASSFQGGSNIDKSFDGDMSTIYHSNWNNAGDHYFPITLTYNFAAGSDMDYLIYYPRTSGPNGNFKEVEIRVKSNANTRGTDEWNTVMTKNFGGTNAAVRVNFPKAQIGVTSVQFIVKSGSGDGQGFAACAEMEFYKKNPDAFDPLTLFTDGTCSELKPGLTDEEIENCPYSFYKNIAYYMKQGKYPAEFRIQEYKAWPHPDAQSETHKTSPYSLRDNPTGISVKDGEQLMIFVGDTHGQTVSAVIQNLDVPGGDGFGGTSYPLSEGANKITARNKGLMYILYHTPDYETAQPVKIHIASGQVNGYFDVAKHQASDWNKLLSNAVDKYFDVVGHYAHLTFPTERFRTHTPDGKALIDAYDQIVNSEMELMGLYKYNKLFKNRMYLHVMYTSYMYATSYHTAYNDGTLAELCNVDKLKTSACWGPAHEIGHCNQTRPGLKWLGTTEVTNNIMSEYIQTTIFGQPSRLQTEDMGDGSRNRYSKAWTQIIAAGAPHGNFGSDSDVFCKLVPFWQLELYFGKVLGRTPLQQSDKGGFYPDVYEYIRTHDNLRTAGEQQTEFVYICSLIAKANLLDFFTKWGFLTPVDITVDDYGTGKLTVTQARIDEIRSRVEALGYPKPDVALEYITDNSVELYKDKPGIVAGTATRSGSTFTMTNWKNVAAYEVVDETGKKVCISDGLLAPSGTATFTMKTAWKDGFKVYAVSATGARTAVTF

SEQ ID NO: 58 - protein, 857 aa, Bacteroides fragilis
  HC12 Bacteroides thetaiotaomicron
MTIKRFITNLLALFTLFTVSLACKDTEKSIINSSFSISEEYLIQNLDKSSTSVQIPINTSMELAQWSVSYEANWLQCSKQKTAAEGTFLRITVNENTGETKRTANIKVTSTTATYTITVNQYAKGEVIVEGDIKVTPTGGKASEHQEGQDIENTYDGKFSTDGAAPFHTPWGQSAKFPVTLEYYFKGDTEIDYLIYYTRSGNGNFGKVKVYTTTNPDRSDYTLQGEYDFKEQNAPSKVSFSEGIKATGIKFEVLSGLGDFVSCDEMEFYKTNTDKTLDKQLLTVFTDITCTEIKNNVTNEQIQALPDYFVRIAEAVRDNTYDKWEKEFRIRSYEPYSNIAEWADKLMTKKYSDLDNPTGISVKAGDDIIVLVGDTYGQNISMQCIWETGTEYKQTASSGDVYMLNPGVNKLTMKGEGQLFVMYNTELTSNTAKPIKIHIPLGSGTVNGFFDLKEHKTDEKYAELLKKSTHKYFCIRGEKIMFYFHRNKLLEYVPNNILSAIHLWDNIVGWQQELMGIDDVRPSQVNNHLFAISPEGSYMWASDYQIGFVYTYLGNILLEDNVMAAEDNAWGPAHEIGHVHQAAINWASSTESSNNLFSNFIIYKLGKYKSRGNGLGSVATARYANGQAWYNMGDATHQNEDTETHMRMNWQLWIYYHRCEYKTDFWQTLFKLMREVNMTEGEDPGKKQLEFAKMASKAANQNLTDFFEMWGFFEPVNTTIEQYGTYKYYVSDAMIREAKEYMAQFPAPKHAFQYIEDRKKSEFPSNDYRYSAVGDVGYYTQFKENQKITKAITAELAGRKVSIQNGDEAVAFELRENDENGKLLYFSTFTTFEIPSSILMVNAKLYAVQADGKRILL

SEQ ID NO: 59 - protein, 59 aa, Burkholderia
  AJK48750 Burkholderia 1-59
RACLVNVQFGTQYCLPAGQESYNGDRKWPVLFSGWDVRVQADDGVAVRLSTNPRLDAAG

SEQ ID NO: 60 - protein, 52 aa, Shewanella
  QDO83225 Shewanella
EACIITRDTSDKYCLKAGEIAYTLPKYIMGDEVDLLVPSGLEVVLSDYGSIP

SEQ ID NO: 61 - protein, 52 aa, Shewanella
  QDO83225 Shewanella
EACIVSRKSGEKFCLTAGELSYTLPDYIMGDEVDLQVPSGLVMVLSDDGSIP

SEQ ID NO: 62 - protein, 52 aa, Shewanella
  QDO83225 Shewanella
EACIVSRKSGEKFCLTAGELSYTLPAYIKGDEVDLQIPSGLVMVLSDDGSIP

SEQ ID NO: 63 - protein, 51 aa, Cordyceps
  ATY65184 Cordyceps
LGCVTALATGSRYCRPPGGGGSLPGWISGAEVQVEAMPGAAVTLSDGEGLA

SEQ ID NO: 64 - protein, 53 aa, Burkholderia
  AJY65983 Burkholderia
LGCIVSLDSAQKYCLPAGQQPVQQLPAWIKGQDVFVQADQGVAVRLSDRPNFA

SEQ ID NO: 65 - protein, 53 aa, Burkholderia
  AJK48750 Burkholderia
LGCIVSLDSAQKYCLPAGQPAVGQLPAWIKGQAVFVQADPGVAVRLSDRADFA

SEQ ID NO: 66 - protein, 53 aa, Cordyceps
  ATY65184 Cordyceps
QGCIVSLRTNDSYCLAPGQHAASSTPAWIYAHAVRVDAAPGTAVELSDGDGLA

SEQ ID NO: 67 - protein, 53 aa, channa
  AHG20882 Chania
EGCIISNQTGDKYCLPIGERSGYSLPSWIYNHEVHVDAGSEAKVYLSDWDNLS

SEQ ID NO: 68 - protein, 53 aa, Escherichia
  AEZ43677 Escherichia
EGCIVSVKTAQRYCLPVGQRSGSRLPDWIAGQEVYVDSGAKAKVLLSDWDNLS

SEQ ID NO: 69 - protein, 53 aa, Escherichia
  BAI33938 Escherichia
EGCIVSVKTAQRYCLPVGQRSGSSLPDWIAGQEVYVDSGAKAKVLLSDWDNLS

SEQ ID NO: 70 - protein, 53 aa, Escherichia
  StcE X409
EGCIVSVNSGKRYCLPVGQRSGYSLPDWIVGQEVYVDSGAKAKVLLVDWDNLS

SEQ ID NO: 71 - protein, 53 aa, Escherichia
  QIC005991Escherichia
EGCIVSVKTGQRYCLPVGQRSGYSLPDWIVGQEVYVDSGAKAKVLLSDWDNLS

SEQ ID NO: 72 - protein, 53 aa, Escherichia
  QHF669851Escherichia
EGCIVSVNTGQRYCLPVGQRSGYSLPNWIIGQEVHVDAGLNAKVLLSDWDNLS

SEQ ID NO: 73 - protein, 53 aa, Shewanella
  ACK488121Shewanella
EGCIVSNTTGAQYCLPVGSRSGYSLPNWIIGQEVHVDAGLNAKVLLSDWDNLS

SEQ ID NO: 74 - protein, 53 aa, Aeromonas
  QBX769461Aeromonas
EGCIVSVNTGKQYCLPVGSRSGYSLPNWIVGQEVYVDSGSKAKVLLSDWDNLS

SEQ ID NO: 75 - protein, 53 aa, Escherichia
  AUM108351Escherichia
EGCIISISSGKRYCLSVGKRSGPSLPEWIIGWEVYVDSGSKAKVLLSDWNNLS

SEQ ID NO: 76 - protein, 53 aa, Escherichia
  AMB568341Escherichia
EGVIISASSGQRYCLPVGKRSGYRLPEWIIGHEVYVDSGAKAKVLLSDWDNLL

SEQ ID NO: 77 - protein, 53 aa, Burkholderia
  AFJ858341Burkholderia
LGCIVSLTSGAKYCLPAGQRSGRALPSWIYANEVQVEAAAGIAVMLSDTDDLA

SEQ ID NO: 78 - protein, 53 aa, Cupriavidus
  AVA370311Cupriavidus
LGCIVSLVSVDKYCLPAGERSAYSLPAWIYADHVVVWQADFTGVMLSDWDNLS

SEQ ID NO: 79 - protein, 53 aa, Cupriavidus
  ABF099691Cupriavidus
LGCIVSLVSVDKYCLPAGERSAYSLPAWIYAHDVVVQADAGIGVMLSDWDNLS

SEQ ID NO: 80 - protein, 53 aa, Shewanella
  QDO832251Shewanella
EACIISRITNEKYCLTAGQRSGYALPHYIRGHEVDLIVPDGLKVILSFWDNLS

SEQ ID NO: 81 - protein, 53 aa, Pseudoalteromonas
  ASD695101Pseudoalteromonas
QACIRSLDTGDKFCLEAGQRSGYSLPSYINKHAVEVIAPPGLGVVLSDWDLNS

SEQ ID NO: 82 - protein, 53 aa, Pseudoalteromonas
  ATD095041Pseudoalteromonas
QACIRSLDTGDKFCLEAGQRSGYSLPNYIYGHAVEVIAPPGLGVVLSDWDNLS

SEQ ID NO: 83 - protein, 53 aa, Vibrio
  AIW14640 I Vibrio
EGCIVSLETGEKYCLKVGERSGYSLPSAFIYQHDIDVYAAGTAVLMSDWDNLS

SEQ ID NO: 84 - protein, 54 aa, Pseudoalteromonas
  ASD695101Pseudoalteromonas
KQACIKSLKTGEFYCLQAGETSGYSLPSYIYEQEVEVIAPEGLGVVLSDWDNLS

SEQ ID NO: 85 - protein, 53 aa, Pseudoalteromonas
  ATD095041Pseudoalteromonas
QACIKSLKTGELYCLQAGETSGYSLPSYIYRHEVEVIAPEGLGVVLSDWDNLS

SEQ ID NO: 86 - protein, 53 aa, Cupriavidus
  ABF099691Cupriavidus
QGCIISLRNGAKYCLEAGQKSDYSLPAWIYAHDVYVQADSGVSVVLSDWDNLS

SEQ ID NO: 87 - protein, 53 aa, Cupriavidus
  AVA370311Cupriavidus
QGCIISLRNGAEYCLEVGQNSGYSLPAWIYAHEVYVQADSGVSVVLSDWDNLS

SEQ ID NO: 88 - protein, 53 aa, Vibrio
  CCO585371Vibrio
EACIVSRQTGAEYCLKAGQRSGYSLPYYIRGHQVDVIAPEGLAVMLSDWDNLS

SEQ ID NO: 89 - protein, 53 aa, Vibrio
  CCO585371Vibrio
KACIVSRDTGAKYCLQAGQRSGYSLPSYIRTGHDVDVIAEGLGVMLSDWDNLS

SEQ ID NO: 90 - protein, 53 aa, Pseudoalteromonas
  ASD695101Pseudoalteromonas
SACIVSRQTQESYCLKAGESSGYSLPSYIYNHEVFVIAPPGLGVMLSDWDNLS

SEQ ID NO: 91 - protein, 53 aa, Pseudoalteromonas
  ASD695ATD095041Pseudoalteromonas
SACIVSRQTQESYCLKAGERSGYSLPDYIYNHEVDVIAPPFLFVMLSDWDNLS

SEQ ID NO: 92 - protein, 52 aa, Vibrio
  AMG039851Vibrio
GCIISRLNGEKYCLKAGERSGYSLPNWIYAHPVDVLAPSGVSVMLSDWDDLS

SEQ ID NO: 93 - protein, 52 aa, Vibrio
  AXN335341Vibrio
GCIISQQSGEKYCLKAGERSGYSLPNWIYAHPVDVLAPSDVSVMLSDWDNLS

SEQ ID NO: 94 - protein, 52 aa, Vibrio
  AOW831231Vibrio
GCIISRLNGEKYCLKAGERSGYSLPMWIYAHPVDVQAPSGISVMLSDWDNLS

SEQ ID NO: 95 - protein, 52 aa, Vibrio
  ASO287011Vibrio
GCIISRLNGEKYCLNVGERSGYSLPSWIYAHPVDVQAPSGVSVMLSDWDNLS

SEQ ID NO: 96 - protein, 52 aa, Vibrio
  AXM762651Vibrio
GVIIDRLNGEKYCLNVGERSGYSLPSWIYAHPVDVQAPSGVSVMLSDWDNLS

SEQ ID NO: 97 - protein, 52 aa, Vibrio
  SYZ819411Vibrio
GCIISRLNGEKYCLNVGERSGYSLPSWIYAHPVSVWAPSGVSVMLSDWDNLS

SEQ ID NO: 98 - protein, 52 aa, Vibrio
  AOY503121Vibrio
GCIISRLNGEKYCKVGVERSGYSLPSWIYAHPVDVQAPSGVSVMLSDWDNLS

SEQ ID NO: 99 - protein, 52 aa, Vibrio
  AYC05819 i Vibrio
GCIISRLNGEKYCLKVGERSGYSLPSWIYAHPVDVQASSGVSVMLSDWDNLS

SEQ ID NO: 100 - protein, 53 aa, Vibrio
  AZS257161Vibrio
EGCIISRETGAKYCLKPGERSGYSLQQIYYNHAVDVLAPSGISVMLSDWDNLS

SEQ ID NO: 101 - protein, 53 aa, Vibrio
  AQM30209 I Vibrio
EGCIISRKTGDKYCLNIGQRSEYSLPSWIYNHAVDVLAPSGISVLMSDWDNLS

SEQ ID NO: 102 - protein, 53 aa, Vibrio
  ANW262991Vibrio
EACIVSLENDERYCLKEGWESGYSLPEYIKGHEVEVRAPEGLGVMLSDWDNLS

SEQ ID NO: 103 - protein, 53 aa, Vibrio
  AIW218491Vibrio
EACIVSLENDEQYCLKEGQRSGYSLPEYIKGHEVEVRAPEGLGVMLSDWDNLS

SEQ ID NO: 104 - protein, 53 aa, Vibrio
  AXN335341Vibrio
EACIVSLENDERYCLKEGQRSGYSLPEYIKGHEVEVRAPEGLGVMLSDWDNLS

SEQ ID NO: 105 - protein, 53 aa, Vibrio
  ATC570381Vibrio
EACIVSRENGERFCLKEGQRSGYSLPSYIYGHPVDIVAPEGLGVMLSDWDNLS

SEQ ID NO: 106 - protein, 53 aa, Vibrio
  AQM302091Vibrio
EACIVSRENGERFCLKEGERSGYSLPSYIYGHAVDIVAPEGLFVILSDWDNLS

SEQ ID NO: 107 - protein, 53 aa, Vibrio
  AQL922591Vibrio
EACIVSRENGERFCLKEGERSGYSLPSYIYGHAVDIVAPEGLGVILSDWDNLS

SEQ ID NO: 108 - protein, 53 aa, Vibrio
  AQL817701Vibrio
EACIVSRENAERFCLKEGERSGYSLPSYIYGHAVDIVAPEGLGVILSDWDNLS

SEQ ID NO: 109 - protein, 53 aa, Vibrio
  AZS257161Vibrio
EACIISRKSGERFCLKEGERSGYSLPAYIYGHEVDVEAPKGLGVILSDWDNLS

SEQ ID NO: 110 - protein, 53 aa, Vibrio
  AOW831231Vibrio
EACIVSRQTGERFCLKEGERSGYSLPAYIYGHEVDIEAPQGLGVMLSDWDNLS

SEQ ID NO: 111 - protein, 53 aa, Vibrio
  ATD278261Vibrio
EACIVSRQTGERRFCLKEGERSGYSLPAYIGHEVDVEAPLGLGVMLSDWDNLS

SEQ ID NO: 112 - protein, 53 aa, Vibrio
  AWK286711Vibrio
EACIVSRQTGERFCLKEGERSGYSLPAYIYGHEVDVEAPLGLGVMLSDWDNLS

SEQ ID NO: 113 - protein, 53 aa, Vibrio; identical to SEQ ID NO: 112
  ATV906211Vibrio

SEQ ID NO: 114 - protein, 53 aa, Vibrio
  AKO745181Vibrio
EACIVSRQTGERFCLKEGERSGYSLPAYIYGHEVDVEAPLGLGMVLSDWDNLS

SEQ ID NO: 115 - protein, 53 aa, Vibrio; identical to SEQ ID NO: 112
  AEA780651Vibrio

SEQ ID NO: 116 - protein, 53 aa, Vibrio
  AXM762651Vibrio
EACIVSRQTGERFCLKEGERSGYSLPAYIYTHEVDVEAPQGLGVMLSDWDNLS

SEQ ID NO: 117 - protein, 53 aa, Vibrio
  ASU217881Vibrio
EACIVSRQTGERFCLKEGERSGYSLPAYIYAHEVDVEAPQGLGVMLSDWDNLS

SEQ ID NO: 118 - protein, 38 aa, Burkholderia
  AJK48750 1Burkholderia
IGKSAQFFGTTDTDRLRHVKANNGEYLNFSQPNAMRVT

SEQ ID NO: 119 - protein, 38 aa, Shewanella
  QD083225 1Shewanella
NNHTASFDRYTENKQLEHVKARNGKYLDFSTPYSMLVV

SEQ ID NO: 120 - protein, 38 aa, Shewanella; identical to SEQ ID NO: 119
  QD083225 1Shewanella

SEQ ID NO: 121 - protein, 38 aa, Shewanella
  QD083225 1Shewanella
NNHTASFDRYTENKQLEHVKARNGKYLDFSAPYSMLVV

SEQ ID NO: 122 - protein, 38 aa, Cordyceps
  ATY65184 1Cordyceps
GNGTATFDGFVQNWELKGARTVDGAVLDVSRPKSMRVS

SEQ ID NO: 123 - protein, 38 aa, Burkholderia
  AJY 65 98 3 1 Burkholderia
YNRVATFSGTVSHDKLIKVRADNGEDLDFSRPVSMEVI

SEQ ID NO: 124 - protein, 40 aa, Burkholderia
  AJK48750 1Burkholderia
YNRVATFSGTVDHDKLLKVRADNGEDLDFSRPVSMEVIQH

SEQ ID NO: 125 - protein, 38 aa, Burkholderia
  ALK32990 1Burkholderia
YNRVATFSGTVDHDKLLKVRADNGEDLDFSRPVSMEVI

SEQ ID NO: 126 - protein, 37 aa, Cordyceps
  ATY65184 1Cordyceps
RGRVARLVGSVENEALRAVEADSGERLDVSRPSMRVV

SEQ ID NO: 127 - protein, 40 aa, Channa
  AHG20882 1Chania
YSRVGEFIFNVATSELKNVRAWNGMYLDFSKPKSMRVVSK

SEQ ID NO: 128 - protein, 40 aa, Escherichia
  AEZ43677 1Escherichia
YNRIGEFVGNVNPADMKKVKAWNGQYLDFSRPRSMRVVNK

SEQ ID NO: 129 - protein, 40 aa, Escherichia; identical to SEQ ID NO: 128
  BAI33938 1Escherichia

SEQ ID NO: 130 - protein, 40 aa, Escherichia
  StcE X4 09
YNRIGEFVGNVNPADMKKVKAWNGQYLDFSKPRSMRVVYK

SEQ ID NO: 131 - protein, 40 aa, Escherichia
  QIC00599 Escherichia
YNRIGEFVGNVYPNDMKKVKAWNGQYLDFSRPRSMRVVYK

SEQ ID NO: 132 - protein, 40 aa, Escherichia
  QHF66985 Escherichia
YNRIGEFVGNVNPTDMKKVKAWNGQYLDFSRPRSMRVVYK

SEQ ID NO: 133 - protein, 40 aa, Shewanella
  ACK48812 Shewanella
YNRIGEFVGSVGTNEMKKVKAWNGQYLDFSRPRSMRVVSN

SEQ ID NO: 134 - protein, 40 aa, Aeromonas
  QBX76946 Aeromonas
YSRIGEFVGSVGTHEMKSVKAWNGQYLDFSRPRSMRVVSN

SEQ ID NO: 135 - protein, 38 aa, Escherichia
  AUM10835 Escherichia
YNRIGEFVGSVSSMDLKKVKAWNGEYLDFSKPRSMRVI

SEQ ID NO: 136 - protein, 40 aa, Escherichia
  AMBS6834 Escherichia
YNRIGEGVGSVSPGEMKKVKAWNGQYLDFSKPRSMRVVSN

SEQ ID NO: 137 - protein, 40 aa, Escherichia; identical to SEQ ID NO: 136
  ANP05368 Escherichia

SEQ ID NO: 138 - protein, 40 aa, Burkholderia
  AFJ85834 Burkholderia
FNRVATFTGLTQNWELKKAKAWNGEDLDFSRPKSMRVVQQ

SEQ ID NO: 139 - protein, 40 aa, Metarhizium
  QLI66334 Metarhizium
QDRLATFTGFVQNWDLTKVRALNGEDLDFSRPKSMRVIRQ

SEQ ID NO: 140 - protein, 38 aa, Metarhizium
  QLI66334 Metarhizium
YNRIATFVGTVENNRLKSVKAANGKYLDFSRPHSMRVV

SEQ ID NO: 141 - protein, 40 aa, Burkholderia
  AVR17394 Burkholderia
YNRIATFVGTVENGGLKQVKAVNGQVLDFSRPHSMRVVRD

SEQ ID NO: 142 - protein, 40 aa, Burkholderia; identical to SEQ ID NO: 141
  AFJ85834 Burkholderia

SEQ ID NO: 143 - protein, 40 aa, Cupriavidus
  AVA37031 Cupriavidus
YNRLAVFSGVVENENMTNVKAYDGQMLNFSKPRSMRVVQQ

SEQ ID NO: 144 - protein, 40 aa, Cupriavidus
  ABF09969 Cupriavidus
YNRLAVFSDVVENENMKRVQAYDGQTLDFSKPRSMRVVQQ

SEQ ID NO: 145 - protein, 37 aa, Shewanella
  QD083225 Shewanella
YNRLGFFTKDTDNADLINVLAFNGEYLDFSEPHSMRV

SEQ ID NO: 146 - protein, 38 aa, Pseudoalteromonas
  ASD69510 Pseudoalteromonas
YNRIATFTGYKSNSQLINVQARNGEALNFSTPRSMSVV

SEQ ID NO: 147 - protein, 38 aa, Pseudoalteromonas
  ATD09504 Pseudoalteromonas
YNRLATFTGYTKNGRLMNVQARNGEMNLFSTPRSMSVI

SEQ ID NO: 148 - protein, 38 aa, Vibrio
  AIW14640 Vibrio
YNRLAVFQGFTPNQELESVTAYNGKIIDFSAPRSMRVV

SEQ ID NO: 149 - protein, 42 aa, Pseudoalteromonas
  ASD69510 Pseudoalteromonas
YNRIATFTGNVSNKMLEANLANNGEYLDFSSPRSMKVISIAP

SEQ ID NO: 150 - protein, 39 aa, Pseudoalteromonas
  ATD09504 Pseudoalteromonas
YNRIATFTGDVSNNMLENNLAKNGDYLDFSAPRSMKVIS

SEQ ID NO: 151 - protein, 38 aa, Cupriavidus
  ABF09969 Cupriavidus
YHRLAEFVGTVENDKLRGVKANNGETLDFSKPRSMEVK

SEQ ID NO: 152 - protein, 38 aa, Cupriavidus
  AVA37031 Cupriavidus
YNRLAEFVGTVENDKLRAVKAHNGETLDFSKPRSMRVA

SEQ ID NO: 153 - protein, 40 aa, Vibrio
  CC058537 Vibrio
YNRLAVFTKDTNNEDMKNVRAYNGRYLDFSHPRSMRVLSR

SEQ ID NO: 154 - protein, 38 aa, Vibrio
  CC058531 Vibrio
YNRLAVFERHTHNEAMEHVKARNGQYLDFSNPRSMRVV

SEQ ID NO: 155 - protein, 41 aa, Pseudoalteromonas
  ASD69510 Pseudoalteromonas
YNRIATFTGYTNNAQLKQVTAKNGQKLDFSHPRSMRVVSTQ

SEQ ID NO: 156 - protein, 39 aa, Pseudoalteromonas
  ATD09504 Pseudoalteromonas
YNRIATFTGYTNNAQLQRVTAKDGQELDFSHPRSMRVVS

SEQ ID NO: 157 - protein, 40 aa, Vibrio
  AMG03985 Vibrio
YNRLAVFGGQTKNEQLRAVTAYNGEVLDFSKPRSMRVVPY

SEQ ID NO: 158 - protein, 40 aa, Vibrio
  AXN33534 Vibrio
YNRLAVFGGQTKNEQLRAVTAYNGEVLDFSKPRSMRVLAS

SEQ ID NO: 159 - protein, 40 aa, Vibrio
  AO 83123 IVibrio
YNRLAVFSSYTGNEDLKNVKAYNGAYLDFSKPRSMRVLAS

SEQ ID NO: 160 - protein, 40 aa, Vibrio
  AS028701 1Vibrio
YNRLAVFNSYTGNEDLKNVKAYNGAYLDFSKPRSMRVLAS

SEQ ID NO: 161 - protein, 40 aa, Vibrio
  AXM76265 1Vibrio
YNRLAVFNRYTGNEDLKNVKAYNGAYLDFSKPRSMRVLAS

SEQ ID NO: 162 - protein, 40 aa, Vibrio
  SYZ81941 1Vibrio
YNRLAVFNRYTGNEDLKNVKAENGAYLDFSKPRSMRVLAS

SEQ ID NO: 163 - protein, 40 aa, Vibrio
  AOYS0312 1Vibrio
YNRLAVFDRYTGNEDLKNVKAYNGAYLDFSKPRSMRVLAS

SEQ ID NO: 164 - protein, 40 aa, Vibrio
  AYC05819 I Vibrio
YNRLAVFDRYTGNEDLKNCKAYNGAYLDFSKPRSMRVLAS

SEQ ID NO: 165 - protein, 40 aa, Vibrio
  AZS25716 1Vibrio
NRLAVMFDGYTGNDELKNVKAYNGQILDFSHPRSMRVLAS

SEQ ID NO: 166 - protein, 40 aa, Vibrio
  AQM30209 1Vibrio
YNRLAVFDHYTDNSELKNVKALNGQALDFSHPRSMRVLAS

SEQ ID NO: 167 - protein, 40 aa, Vibrio
  ANW26299 1Vibrio
YNRLAVFGGHKSNAQLESVKAYNGEILDFSNPRSMRVLAY

SEQ ID NO: 168 - protein, 40 aa, Vibrio
  AIW21849 1Vibrio
YNRLAVFGGYKSNAQLESVKAYNGEILDFSNPRSMRVLAY

SEQ ID NO: 169 - protein, 40 aa, Vibrio; identical to SEQ ID NO: 168
  AXN33534 I Vibrio

SEQ ID NO: 170 - protein, 40 aa, Vibrio
  ATC57038 1Vibrio
YNRLAVFDGNTSNAQLKSVKAYNGELLDFSHPRSMRVVSF

SEQ ID NO: 171 - protein, 40 aa, Vibrio
  AQM30209 1Vibrio
YNRLAVFGGNTSNAQLKSVKAYNGELLDFSHPRSMRVVPF

SEQ ID NO: 172 - protein, 40 aa, Vibrio
  AQL92259 1Vibrio
YNRLAVFGGNTSNAQLKSVKAYNGELLDFSHPRSMRVVSF

SEQ ID NO: 173 - protein, 40 aa, Vibrio; identical to SEQ ID NO: 172
  AQL81770 1Vibrio

SEQ ID NO: 174 - protein, 41 aa, Vibrio
  AZS25716 1Vibrio
YNRLAVFGGDTSASSLLNAVKAYNGEILDFSHPHSMRVVPY

SEQ ID NO: 175 - protein, 40 aa, Vibrio
  AOW 83123 1Vibrio
YNRLAVFGGQTQNEQLRAVTAYNGEVLDFSKPRSMRVVPY

SEQ ID NO: 176 - protein, 40 aa, Vibrio
  ATD27826 1Vibrio
YNRLAVFGGNTQNEQMRAVKAYNGETLDFSKPRSMRVVPY

SEQ ID NO: 177 - protein, 40 aa, Vibrio
  AWK28671 1Vibrio
YNRLAVFGGNTQNEQMRAVKAYNGETLDFSKPRSMRVVSY

SEQ ID NO: 178 - protein, 40 aa, Vibrio
  ATV90621 1Vibrio
YNRLAVFGGNTQNEQMRATKAYNGETLDFSKPRSMRVVPY

SEQ ID NO: 179 - protein, 40 aa, Vibrio
  AK074518 1Vibrio
YNRLAVFGGNTQNEQMRAVKAYNDETLDFSKPRSMRVVPY

SEQ ID NO: 180 - protein, 39 aa, Vibrio
  AEA78065 1Vibrio
YNRLAVFGGNTQNEQMRAVKAYNGETLDFSKPRSMRVVY

SEQ ID NO: 181 - protein, 40 aa, Vibrio
  AXM76265 1Vibrio
YNRLAVFGGHTQNEQMLAVTAYNGETLDFSKPRSMRVVPY

SEQ ID NO: 182 - protein, 41 aa, Vibrio
  ASU21788 1Vibrio
YNRLAVFGGHTQNESQMRAVTAYNGETLDFSKPRSMRVVPY

SEQ ID NO: 183 - protein, 52 aa, Unknown
  QCN624691806-898
EGCIVSVNSGKRYCLPVGQRSGYSLPDWIVGQEVYVDSGAKAKVLSDWDNLS

SEQ ID NO: 184 - protein, 52 aa, Unknown; identical to SEQ ID NO: 183
  QCN515081806-89

SEQ ID NO: 185 - protein, 52 aa, Unknown; identical to SEQ ID NO: 183
  QCN679431806-898

SEQ ID NO: 186 - protein, 52 aa, Unknown; identical to SEQ ID NO: 183
  QCN679431806-898

SEQ ID NO: 187 - protein, 52 aa, Unknown; identical to SEQ ID NO: 183
  StcEl806-898

SEQ ID NO: 188 - protein, 52 aa, Unknown; identical to SEQ ID NO: 183
  QCN73397 i 806-898

SEQ ID NO: 189 - protein, 52 aa, Unknown; identical to SEQ ID NO: 183
  QCN788741806-898

SEQ ID NO: 190 - protein, 52 aa, Unknown; identical to SEQ ID NO: 183
  QCH857061806-898

SEQ ID NO: 191 - protein, 52 aa, Unknown; identical to SEQ ID NO: 183
  QDG032501806-898

SEQ ID NO: 192 - protein, 52 aa, Unknown; identical to SEQ ID NO: 183
  ABV829811794-886

SEQ ID NO: 193 - protein, 52 aa, Unknown; identical to SEQ ID NO: 183
  QCM527311806-898

SEQ ID NO: 194 - protein, 52 aa, Unknown; identical to SEQ ID NO: 183
  QDK104921794-886

SEQ ID NO: 195 - protein, 52 aa, Unknown; identical to SEQ ID NO: 183
  AOV568161794-886

SEQ ID NO: 196 - protein, 52 aa, Unknown; identical to SEQ ID NO: 183
  BBC535931794-886

SEQ ID NO: 197 - protein, 52 aa, Unknown; identical to SEQ ID NO: 183
  AIG719121794-886

SEQ ID NO: 198 - protein, 52 aa, Unknown; identical to SEQ ID NO: 183
  QCL624201806-898

SEQ ID NO: 199 - protein, 52 aa, Unknown; identical to SEQ ID NO: 183
  QCM252961806-898

SEQ ID NO: 200 - protein, 52 aa, Unknown; identical to SEQ ID NO: 183
  ASL567231794-886

SEQ ID NO: 201 - protein, 52 aa, Unknown; identical to SEQ ID NO: 183
  QCN130651806-898

SEQ ID NO: 202 - protein, 52 aa, Unknown; identical to SEQ ID NO: 183
  QCL679091806-898

SEQ ID NO: 203 - protein, 52 aa, Unknown; identical to SEQ ID NO: 183
  QCN020921806-898

SEQ ID NO: 204 - protein, 52 aa, Unknown; identical to SEQ ID NO: 183
  QCN294491806-898

SEQ ID NO: 205 - protein, 52 aa, Unknown; identical to SEQ ID NO: 183
  AOV245701794-886

SEQ ID NO: 206 - protein, 52 aa, Unknown; identical to SEQ ID NO: 183
  QCM198071806-898

SEQ ID NO: 207 - protein, 52 aa, Unknown; identical to SEQ ID NO: 183
  BBE157351794-886

SEQ ID NO: 208 - protein, 52 aa, Unknown; identical to SEQ ID NO: 183
  API353931794-886

SEQ ID NO: 209 - protein, 52 aa, Unknown; identical to SEQ ID NO: 183
  QCN185531806-898

SEQ ID NO: 210 - protein, 52 aa, Unknown; identical to SEQ ID NO: 183
  AOV406991794-886

SEQ ID NO: 211 - protein, 52 aa, Unknown; identical to SEQ ID NO: 183
  AOV460471794-886

SEQ ID NO: 212 - protein, 52 aa, Unknown; identical to SEQ ID NO: 183
  AOV299221794-886

SEQ ID NO: 213 - protein, 52 aa, Unknown; identical to SEQ ID NO: 183
  API409231794-886

SEQ ID NO: 214 - protein, 52 aa, Unknown; identical to SEQ ID NO: 183
  API130061794-886

SEQ ID NO: 215 - protein, 52 aa, Unknown; identical to SEQ ID NO: 183
  API185591794-886

SEQ ID NO: 216 - protein, 52 aa, Unknown; identical to SEQ ID NO: 183
  ANW437721794-886

SEQ ID NO: 217 - protein, 52 aa, Unknown; identical to SEQ ID NO: 183
  AOV352871794-886

SEQ ID NO: 218 - protein, 52 aa, Unknown; identical to SEQ ID NO: 183
  AOX552621794-886

SEQ ID NO: 219 - protein, 52 aa, Unknown; identical to SEQ ID NO: 183
  ANG833511806-898

SEQ ID NO: 220 - protein, 52 aa, Unknown; identical to SEQ ID NO: 183
  APA44909 794-886

SEQ ID NO: 221 - protein, 52 aa, Unknown; identical to SEQ ID NO: 183
  API24204 794-886

SEQ ID NO: 222 - protein, 52 aa, Unknown; identical to SEQ ID NO: 183
  QJZ69887 806-898

SEQ ID NO: 223 - protein, 52 aa, Unknown; identical to SEQ ID NO: 183
  QJZ75438 806-898

SEQ ID NO: 224 - protein, 52 aa, Unknown; identical to SEQ ID NO: 183
  QJZ86374 806-898

SEQ ID NO: 225 - protein, 52 aa, Unknown; identical to SEQ ID NO: 183
  QJZ80864 806-898

SEQ ID NO: 226 - protein, 52 aa, Unknown; identical to SEQ ID NO: 183
  QJZ96901 806-898

SEQ ID NO: 227 - protein, 52 aa, Unknown; identical to SEQ ID NO: 183
  QJZ91663 806-898

SEQ ID NO: 228 - protein, 52 aa, Unknown; identical to SEQ ID NO: 183
  QKB04460 806-898

SEQ ID NO: 229 - protein, 52 aa, Unknown; identical to SEQ ID NO: 183
  QKB15145 806-898

SEQ ID NO: 230 - protein, 52 aa, Unknown; identical to SEQ ID NO: 183
  QKA93622 806-898

SEQ ID NO: 231 - protein, 52 aa, Unknown; identical to SEQ ID NO: 183
  QKA98997 806-898

SEQ ID NO: 232 - protein, 52 aa, Unknown; identical to SEQ ID NO: 183
  QKB09647 806-898

SEQ ID NO: 233 - protein, 52 aa, Unknown; identical to SEQ ID NO: 183
  QKB46000 806-898

SEQ ID NO: 234 - protein, 52 aa, Unknown; identical to SEQ ID NO: 183
  API29691 I 794-886

SEQ ID NO: 235 - protein, 52 aa, Unknown; identical to SEQ ID NO: 183
  QKB204941806-898

SEQ ID NO: 236 - protein, 52 aa, Unknown; identical to SEQ ID NO: 183
  ACT751611802-894

SEQ ID NO: 237 - protein, 52 aa, Unknown; identical to SEQ ID NO: 183
  QJZ432921806-898

SEQ ID NO: 238 - protein, 52 aa, Unknown; identical to SEQ ID NO: 183
  QJZ594671806-898

SEQ ID NO: 239 - protein, 52 aa, Unknown; identical to SEQ ID NO: 183
  QCM307901806-898

SEQ ID NO: 240 - protein, 52 aa, Unknown; identical to SEQ ID NO: 183
  QJZ48663!806-898

SEQ ID NO: 241 - protein, 52 aa, Unknown; identical to SEQ ID NO: 183
  QJZ541271806-898

SEQ ID NO: 242 - protein, 52 aa, Unknown; identical to SEQ ID NO: 183
  QKA77619 806-898

SEQ ID NO: 243 - protein, 52 aa, Unknown; identical to SEQ ID NO: 183
  QKA88237 806-898

SEQ ID NO: 244 - protein, 52 aa, Unknown; identical to SEQ ID NO: 183
  QKA66860 806-898

SEQ ID NO: 245 - protein, 52 aa, Unknown; identical to SEQ ID NO: 183
  QKA82899 806-898

SEQ ID NO: 246 - protein, 52 aa, Unknown; identical to SEQ ID NO: 183
  QKA72230 806-898

SEQ ID NO: 247 - protein, 52 aa, Unknown; identical to SEQ ID NO: 183
  QKA61545 806-898

SEQ ID NO: 248 - protein, 52 aa, Unknown; identical to SEQ ID NO: 183
  QKA24163 806-898

SEQ ID NO: 249 - protein, 52 aa, Unknown; identical to SEQ ID NO: 183
  QKA13146 806-898

SEQ ID NO: 250 - protein, 52 aa, Unknown; identical to SEQ ID NO: 183
  QKA18741 806-898

SEQ ID NO: 251 - protein, 52 aa, Unknown; identical to SEQ ID NO: 183
  QKA02128 806-898

SEQ ID NO: 252 - protein, 52 aa, Unknown; identical to SEQ ID NO: 183
  QKA07646 806-898

SEQ ID NO: 253 - protein, 52 aa, Unknown; identical to SEQ ID NO: 183
  QKA29506 806-898

SEQ ID NO: 254 - protein, 52 aa, Unknown; identical to SEQ ID NO: 183
  QKA56122 806-898

SEQ ID NO: 255 - protein, 52 aa, Unknown; identical to SEQ ID NO: 183
  QKA34897 806-898

SEQ ID NO: 256 - protein, 52 aa, Unknown; identical to SEQ ID NO: 183
  QKA40256 806-898

SEQ ID NO: 257 - protein, 52 aa, Unknown; identical to SEQ ID NO: 183
  QKA45406 806-898

SEQ ID NO: 258 - protein, 52 aa, Unknown; identical to SEQ ID NO: 183
  QKA50931 806-898

SEQ ID NO: 259 - protein, 52 aa, Unknown; identical to SEQ ID NO: 183
  QJZ37882 806-898

SEQ ID NO: 260 - protein, 52 aa, Unknown; identical to SEQ ID NO: 183
  QKB72788 806-898

SEQ ID NO: 261 - protein, 52 aa, Unknown; identical to SEQ ID NO: 183
  QKB62079 806-898

SEQ ID NO: 262 - protein, 52 aa, Unknown; identical to SEQ ID NO: 183
  QKB56772 806-898

SEQ ID NO: 263 - protein, 52 aa, Unknown; identical to SEQ ID NO: 183
  QKB51466 806-898

SEQ ID NO: 264 - protein, 52 aa, Unknown; identical to SEQ ID NO: 183
  QKB78174 806-898

SEQ ID NO: 265 - protein, 52 aa, Unknown; identical to SEQ ID NO: 183
  QKB673941806-898

SEQ ID NO: 266 - protein, 52 aa, Unknown; identical to SEQ ID NO: 183
  QKB835751806-898

SEQ ID NO: 267 - protein, 52 aa, Unknown; identical to SEQ ID NO: 183
  QKB941801806-898

SEQ ID NO: 268 - protein, 52 aa, Unknown; identical to SEQ ID NO: 183
  QKB888491806-898

SEQ ID NO: 269 - protein, 52 aa, Unknown; identical to SEQ ID NO: 183
  QKB996101806-898

SEQ ID NO: 270 - protein, 52 aa, Unknown; identical to SEQ ID NO: 183
  QKC049321806-898

SEQ ID NO: 271 - protein, 52 aa, Unknown; identical to SEQ ID NO: 183
  ANG57690!794-886

SEQ ID NO: 272 - protein, 52 aa, Unknown; identical to SEQ ID NO: 183
  AOX606601794-886

SEQ ID NO: 273 - protein, 52 aa, Unknown; identical to SEQ ID NO: 183
  QCN075771806-898

SEQ ID NO: 274 - protein, 52 aa, Unknown; identical to SEQ ID NO: 183
  QCM582181806-898

SEQ ID NO: 275 - protein, 52 aa, Unknown; identical to SEQ ID NO: 183
  AMW462991794-886

SEQ ID NO: 276 - protein, 52 aa, Unknown; identical to SEQ ID NO: 183
  ABV829831794-886

SEQ ID NO: 277 - protein, 52 aa, Unknown; identical to SEQ ID NO: 183
  QCN239621806-898

SEQ ID NO: 278 - protein, 52 aa, Unknown; identical to SEQ ID NO: 183
  QCM691951806-898

SEQ ID NO: 279 - protein, 52 aa, Unknown; identical to SEQ ID NO: 183
  ALH939561794-886

SEQ ID NO: 280 - protein, 52 aa, Unknown; identical to SEQ ID NO: 183
  ABV829821794-886

SEQ ID NO: 281 - protein, 52 aa, Unknown; identical to SEQ ID NO: 183
  QCL236721806-898

SEQ ID NO: 282 - protein, 52 aa, Unknown; identical to SEQ ID NO: 183
  QCM362721806-898

SEQ ID NO: 283 - protein, 52 aa, Unknown; identical to SEQ ID NO: 183
  QCM472451806-898

SEQ ID NO: 284 - protein, 52 aa, Unknown; identical to SEQ ID NO: 183
  AMW461581794-886

SEQ ID NO: 285 - protein, 52 aa, Unknown; identical to SEQ ID NO: 183
  QHP658981806-898

SEQ ID NO: 286 - protein, 52 aa, Unknown; identical to SEQ ID NO: 183
  QCM637061806-898

SEQ ID NO: 287 - protein, 53 aa, Unknown
  ABV829801794-886
EGCIVSVNSGKRYCLPVGQRSGYSLPDWIVGQEVYVDSGAKAKVLLSDWDNLS

SEQ ID NO: 288 - protein, 53 aa, Unknown; identical to SEQ ID NO: 287
  QAV768821806-898

SEQ ID NO: 289 - protein, 53 aa, Unknown; identical to SEQ ID NO: 287
  AOV514591794-886

SEQ ID NO: 290 - protein, 53 aa, Unknown; identical to SEQ ID NO: 287
  QHG469971806-898

SEQ ID NO: 291 - protein, 53 aa, Unknown; identical to SEQ ID NO: 287
  QCM91114 I 806-898

SEQ ID NO: 292 - protein, 53 aa, Unknown; identical to SEQ ID NO: 287
  ANG776531806-898

SEQ ID NO: 293 - protein, 53 aa, Unknown; identical to SEQ ID NO: 287
  QCM966031806-898

SEQ ID NO: 294 - protein, 53 aa, Unknown; identical to SEQ ID NO: 287
  QGU969761806-898

SEQ ID NO: 295 - protein, 53 aa, Unknown; identical to SEQ ID NO: 287
  QCN349351806-898

SEQ ID NO: 296 - protein, 53 aa, Unknown; identical to SEQ ID NO: 287
  QCM417591806-898

SEQ ID NO: 297 - protein, 53 aa, Unknown; identical to SEQ ID NO: 287
  API074201794-886

SEQ ID NO: 298 - protein, 53 aa, Unknown; identical to SEQ ID NO: 287
  QCL456201806-898

SEQ ID NO: 299 - protein, 53 aa, Unknown; identical to SEQ ID NO: 287
  QCM856231806-898

SEQ ID NO: 300 - protein, 53 aa, Unknown; identical to SEQ ID NO: 287
  QCL569271806-898

SEQ ID NO: 301 - protein, 53 aa, Unknown; identical to SEQ ID NO: 287
  QCN460351806-898

SEQ ID NO: 302 - protein, 53 aa, Unknown; identical to SEQ ID NO: 287
  QGK028781806-898

SEQ ID NO: 303 - protein, 53 aa, Unknown; identical to SEQ ID NO: 287
  QGJ261551806-898

SEQ ID NO: 304 - protein, 53 aa, Unknown; identical to SEQ ID NO: 287
  QGG889201806-898

SEQ ID NO: 305 - protein, 53 aa, Unknown; identical to SEQ ID NO: 287
  QGF188841806-898

SEQ ID NO: 306 - protein, 53 aa, Unknown; identical to SEQ ID NO: 287
  QCL291071806- 898

SEQ ID NO: 307 - protein, 53 aa, Unknown; identical to SEQ ID NO: 287
  QCV204521806-898

SEQ ID NO: 308 - protein, 53 aa, Unknown; identical to SEQ ID NO: 287
  QFW541911806-898

SEQ ID NO: 309 - protein, 53 aa, Unknown; identical to SEQ ID NO: 287
  QFV788761806-898

SEQ ID NO: 310 - protein, 53 aa, Unknown; identical to SEQ ID NO: 287
  QFW206011806-898

SEQ ID NO: 311 - protein, 53 aa, Unknown; identical to SEQ ID NO: 287
  QFW017561806-898

SEQ ID NO: 312 - protein, 53 aa, Unknown; identical to SEQ ID NO: 287
  QFX421931806-898

SEQ ID NO: 313 - protein, 53 aa, Unknown; identical to SEQ ID NO: 287
  QFX116621806-898

SEQ ID NO: 314 - protein, 53 aa, Unknown; identical to SEQ ID NO: 287
  QCL51292i806-898

SEQ ID NO: 315 - protein, 53 aa, Unknown; identical to SEQ ID NO: 287
  QCN404851806-898

SEQ ID NO: 316 - protein, 53 aa, Unknown; identical to SEQ ID NO: 287
  QFH12268i806-898

SEQ ID NO: 317 - protein, 53 aa, Unknown; identical to SEQ ID NO: 287
  QFH284341806-898

SEQ ID NO: 318 - protein, 53 aa, Unknown; identical to SEQ ID NO: 287
  QFH177081806-898

SEQ ID NO: 319 - protein, 53 aa, Unknown; identical to SEQ ID NO: 287
  QFH229671806-898

SEQ ID NO: 320 - protein, 53 aa, Unknown; identical to SEQ ID NO: 287
  QFH06760 806-898

SEQ ID NO: 321 - protein, 53 aa, Unknown; identical to SEQ ID NO: 287
  QFH33808 806-898

SEQ ID NO: 322 - protein, 53 aa, Unknown; identical to SEQ ID NO: 287
  QFG95894 806-898

SEQ ID NO: 323 - protein, 53 aa, Unknown; identical to SEQ ID NO: 287
  QFG90630 806-898

SEQ ID NO: 324 - protein, 53 aa, Unknown; identical to SEQ ID NO: 287
  QFG85359 806-898

SEQ ID NO: 325 - protein, 53 aa, Unknown; identical to SEQ ID NO: 287
  QFH01344 806-898

SEQ ID NO: 326 - protein, 53 aa, Unknown; identical to SEQ ID NO: 287
  QCL34540 806-898

SEQ ID NO: 327 - protein, 53 aa, Unknown; identical to SEQ ID NO: 287
  QCV10392 806-898

SEQ ID NO: 328 - protein, 53 aa, Unknown; identical to SEQ ID NO: 287
  AJA29645 806-898

SEQ ID NO: 329 - protein, 53 aa, Unknown; identical to SEQ ID NO: 287
  AFJ32091 806-898

SEQ ID NO: 330 - protein, 53 aa, Unknown; identical to SEQ ID NO: 287
  QCL40052 806-898

SEQ ID NO: 331 - protein, 53 aa, Unknown; identical to SEQ ID NO: 287
  QCM80144 806-898

SEQ ID NO: 332 - protein, 53 aa, Unknown; identical to SEQ ID NO: 287
  ACI34517 806-898

SEQ ID NO: 333 - protein, 53 aa, Unknown; identical to SEQ ID NO: 287
  ASE51165 806-898

SEQ ID NO: 334 - protein, 53 aa, Unknown; identical to SEQ ID NO: 287
  QCM74667 806-898

SEQ ID NO: 335 - protein, 53 aa, Unknown; identical to SEQ ID NO: 287
  AIF97136 806-898

SEQ ID NO: 336 - protein, 53 aa, Unknown; identical to SEQ ID NO: 287
  AAC70099 806-898

SEQ ID NO: 337 - protein, 53 aa, Unknown; identical to SEQ ID NO: 287
  QCN56984 806-898

SEQ ID NO: 338 - protein, 53 aa, Unknown
  QHF66985 806-898
EGCIVSVNTGQRYCLPVGQRSGYSLPDWIVGQEVYVDSGAKAKVLLSDWDNLS

SEQ ID NO: 339 - protein, 53 aa, Unknown; identical to SEQ ID NO: 71
  QIC00599 794-886

SEQ ID NO: 340 - protein, 53 aa, Unknown
  AEZ43677 794-886
EGCIVSVKTAQRYCLPVGQRSGSRLPDWIVGQEVYVDSGAKAKVLLSDWDNLS

SEQ ID NO: 341 - protein, 53 aa, Unknown; identical to SEQ ID NO: 340
  ARD70652 794-886

SEQ ID NO: 342 - protein, 53 aa, Unknown; identical to SEQ ID NO: 340
  QKB25824 794-886

SEQ ID NO: 343 - protein, 53 aa, Unknown; identical to SEQ ID NO: 340
  QKB40907 794-886

SEQ ID NO: 344 - protein, 53 aa, Unknown; identical to SEQ ID NO: 340
  QJZ64437 794-886

SEQ ID NO: 345 - protein, 53 aa, Unknown; identical to SEQ ID NO: 340
  ADD59703 794-886

SEQ ID NO: 346 - protein, 53 aa, Unknown; identical to SEQ ID NO: 340
  ANE68071 794-886

SEQ ID NO: 347 - protein, 53 aa, Unknown
  BAI33938 794-886
EGCIVSVKTAQRYCLPVGQRSGSSLPDWIVGQEVYVDSGAKAKVLLSDWDNLS

SEQ ID NO: 348 - protein, 53 aa, Unknown; identical to SEQ ID NO: 347
  QST30842 794-886

SEQ ID NO: 349 - protein, 53 aa, Unknown; identical to SEQ ID NO: 347
  QST40155 794-886

SEQ ID NO: 350 - protein, 53 aa, Unknown; identical to SEQ ID NO: 347
  AUK24652 794-886

SEQ ID NO: 351 - protein, 53 aa, Unknown; identical to SEQ ID NO: 347
  AUK19526 794-886

SEQ ID NO: 352 - protein, 53 aa, Unknown; identical to SEQ ID NO: 347
  QCH913861135-227

SEQ ID NO: 353 - protein, 53 aa, Unknown; identical to SEQ ID NO: 347
  AUK145111794-886

SEQ ID NO: 354 - protein, 53 aa, Unknown; identical to SEQ ID NO: 347
  QJQ716491794-886

SEQ ID NO: 355 - protein, 53 aa, Unknown; identical to SEQ ID NO: 347
  QCH70040 794-886

SEQ ID NO: 356 - protein, 53 aa, Unknown; identical to SEQ ID NO: 347
  AHG18022 794-886

SEQ ID NO: 357 - protein, 53 aa, Unknown; identical to SEQ ID NO: 347
  ASJ46500 794-886

SEQ ID NO: 358 - protein, 53 aa, Unknown; identical to SEQ ID NO: 347
  QHD14899 794-886

SEQ ID NO: 359 - protein, 53 aa, Unknown; identical to SEQ ID NO: 347
  AHY68417 794-886

SEQ ID NO: 360 - protein, 53 aa, Unknown; identical to SEQ ID NO: 347
  CAP16261 794-886

SEQ ID NO: 361 - protein, 53 aa, Unknown; identical to SEQ ID NO: 347
  QGQ43785 794-886

SEQ ID NO: 362 - protein, 53 aa, Unknown
  AMB56834 793-885
EGCIISASSGQRYCLPVGKRSGYRLPEWIIGHEVYVDSGAKAKVLLSDWDNLS

SEQ ID NO: 363 - protein, 53 aa, Unknown; identical to SEQ ID NO: 362
  ANP05368 793-885

SEQ ID NO: 364 - protein, 53 aa, Unknown; identical to SEQ ID NO: 73
  ACK48812 793-885

SEQ ID NO: 365 - protein, 53 aa, Unknown; identical to SEQ ID NO: 73
  ADT96714 793-885

SEQ ID NO: 366 - protein, 53 aa, Unknown; identical to SEQ ID NO: 73
  AVE26307 793-885

SEQ ID NO: 367 - protein, 53 aa, Unknown
  QBX769461795-887
EGCIVSVNTGKQYCLPVGSRSGYSLPNWIVGQEVYVDSGLKAKVLLSDWDNLS

SEQ ID NO: 368 - protein, 53 aa, Unknown; identical to SEQ ID NO: 367
  QBX722461795-887

SEQ ID NO: 369 - protein, 53 aa, Unknown
  AUM108351793-883
EGCIISISSGKRYCLSVGKRSGPSLPEWIIGQEVYVDSGPKAKVLLSDWNNLS

SEQ ID NO: 370 - protein, 52 aa, Unknown
  AHG208821791-883
EGCIISNQTGDKYCLPIGERSGYSLPSWIYNHEVHVDAGSEAKVLSDWDNLS

SEQ ID NO: 371 - protein, 53 aa, Unknown
  AFJ858341290-382
AGCIVSLQTAARYCLPVGQRSGYALPSWIYAHDVFVDAALGTAVMLSDWDNLS

SEQ ID NO: 372 - protein, 53 aa, Unknown; identical to SEQ ID NO: 371
  AVR173941290-382

SEQ ID NO: 373 - protein, 53 aa, Unknown; identical to SEQ ID NO: 371
  QTK832281290-382

SEQ ID NO: 374 - protein, 53 aa, Unknown; identical to SEQ ID NO: 371
  AB0546001277-36912

SEQ ID NO: 375 - protein, 53 aa, Unknown; identical to SEQ ID NO: 371
  AJY057611290-382

SEQ ID NO: 376 - protein, 53 aa, Unknown
  QLI663341278-36812
QGCIVSLHTKARYCMSAGTRPESSLPRWIYEHEIYVDAAPGTAVKLSDFDNLS

SEQ ID NO: 377 - protein, 53 aa, Unknown
  AVA370311294-384
QGCIISLRNGAKYCLEVGQNSGYSLPAWIYAHEVYVQADSGVSVTLSDWDNLS

SEQ ID NO: 378 - protein, 53 aa, Unknown; identical to SEQ ID NO: 377
  QBP110971294-384

SEQ ID NO: 379 - protein, 53 aa, Unknown
  ABF099691285-375
QGCIISLRNGAKYCLEAGQKSDYSLPAWIYAHDVYVQADSGVSVTLSDWDNLS

SEQ ID NO: 380 - protein, 53 aa, Unknown; identical to SEQ ID NO: 379
  QGS292211285-375

SEQ ID NO: 381 - protein, 53 aa, Unknown
  AVA370311390-48212
LGCIVSLVSVDKYCLPAGERSAYSLPAWIYAHDVVVQADFGTGVMLSDWDNLS

SEQ ID NO: 382 - protein, 53 aa, Unknown; identical to SEQ ID NO: 381
  QBP110971390-48212

SEQ ID NO: 383 - protein, 53 aa, Unknown; identical to SEQ ID NO: 79
  ABF099691381-47312

SEQ ID NO: 384 - protein, 53 aa, Unknown; identical to SEQ ID NO: 79
  QGS292211381-47312

SEQ ID NO: 385 - protein, 53 aa, Unknown
  AEA78065 I 54-146
EACIVSRQTGERFCLKEGERSGYSLPAYIYGHEVCVEAPLGLGVMLSDWDNLS

SEQ ID NO: 386 - protein, 53 aa, Unknown; identical to SEQ ID NO: 385
  AWB711171125-217

SEQ ID NO: 387 - protein, 53 aa, Unknown; identical to SEQ ID NO: 385
  QE0418481125-217

SEQ ID NO: 388 - protein, 53 aa, Unknown; identical to SEQ ID NO: 385
  QGF310541125-217

SEQ ID NO: 389 - protein, 53 aa, Unknown; identical to SEQ ID NO: 385
  QHA224901125-21712

SEQ ID NO: 390 - protein, 53 aa, Unknown; identical to SEQ ID NO: 112
  QHQ89411l125-217

SEQ ID NO: 391 - protein, 53 aa, Unknown; identical to SEQ ID NO: 112
  QJS89303l125-217l 2

SEQ ID NO: 392 - protein, 53 aa, Unknown; identical to SEQ ID NO: 112
  QJS92899l125-217l2

SEQ ID NO: 393 - protein, 53 aa, Unknown; identical to SEQ ID NO: 112
  QJS85662l125-217l2

SEQ ID NO: 394 - protein, 53 aa, Unknown; identical to SEQ ID NO: 112
  QJS82039l125-217

SEQ ID NO: 395 - protein, 53 aa, Unknown; identical to SEQ ID NO: 112
  QJS78467l125-217

SEQ ID NO: 396 - protein, 53 aa, Unknown; identical to SEQ ID NO: 112
  QKU75185l125-217l2

SEQ ID NO: 397 - protein, 53 aa, Unknown; identical to SEQ ID NO: 112
  QKU71240l125-217

SEQ ID NO: 398 - protein, 53 aa, Unknown; identical to SEQ ID NO: 112
  QKU67443l125-217

SEQ ID NO: 399 - protein, 53 aa, Unknown; identical to SEQ ID NO: 112
  QKU63560l125-217

SEQ ID NO: 400 - protein, 53 aa, Unknown; identical to SEQ ID NO: 112
  QKU59924l125-217

SEQ ID NO: 401 - protein, 53 aa, Unknown; identical to SEQ ID NO: 112
  QKU79076 125-217

SEQ ID NO: 402 - protein, 53 aa, Unknown; identical to SEQ ID NO: 112
  QKU56298 125-217

SEQ ID NO: 403 - protein, 53 aa, Unknown; identical to SEQ ID NO: 112
  QLK90734 125-217

SEQ ID NO: 404 - protein, 53 aa, Unknown; identical to SEQ ID NO: 112
  QNE70179 125-21712

SEQ ID NO: 405 - protein, 53 aa, Unknown; identical to SEQ ID NO: 112
  QPC54135 125-21712

SEQ ID NO: 406 - protein, 53 aa, Unknown; identical to SEQ ID NO: 112
  QTV07561 125-21712

SEQ ID NO: 407 - protein, 53 aa, Unknown; identical to SEQ ID NO: 112
  QTV02748 125-217

SEQ ID NO: 408 - protein, 53 aa, Unknown; identical to SEQ ID NO: 112
  AOY50312 125-21712

SEQ ID NO: 409 - protein, 53 aa, Unknown; identical to SEQ ID NO: 112
  AYC05819 125-21712

SEQ ID NO: 410 - protein, 53 aa, Unknown; identical to SEQ ID NO: 112
  AOY46705 125-217

SEQ ID NO: 411 - protein, 53 aa, Unknown; identical to SEQ ID NO: 112
  AWK28649 125-21712

SEQ ID NO: 412 - protein, 53 aa, Unknown; identical to SEQ ID NO: 112
  AWK28455 125-217

SEQ ID NO: 413 - protein, 53 aa, Unknown; identical to SEQ ID NO: 112
  ATV90566l125-217l2

SEQ ID NO: 414 - protein, 53 aa, Unknown; identical to SEQ ID NO: 112
  ATV90551 125-21712

SEQ ID NO: 415 - protein, 53 aa, Unknown; identical to SEQ ID NO: 112
  APF78461 125-21712

SEQ ID NO: 416 - protein, 53 aa, Unknown; identical to SEQ ID NO: 112
  ATV90597 125-21712

SEQ ID NO: 417 - protein, 53 aa, Unknown; identical to SEQ ID NO: 112
  AWK28549 125-21712

SEQ ID NO: 418 - protein, 53 aa, Unknown; identical to SEQ ID NO: 112
  APF48513 125-217

SEQ ID NO: 419 - protein, 53 aa, Unknown; identical to SEQ ID NO: 112
  ARB81387 125-217

SEQ ID NO: 420 - protein, 53 aa, Unknown; identical to SEQ ID NO: 112
  ATV90621 125-217

SEQ ID NO: 421 - protein, 53 aa, Unknown; identical to SEQ ID NO: 112
  AWK28778 125-21712

SEQ ID NO: 422 - protein, 53 aa, Unknown; identical to SEQ ID NO: 112
  QAV04291 125-21712

SEQ ID NO: 423 - protein, 53 aa, Unknown; identical to SEQ ID NO: 112
  SYZ81941 125-21712

SEQ ID NO: 424 - protein, 53 aa, Unknown; identical to SEQ ID NO: 112
  AK074518 125-217

SEQ ID NO: 425 - protein, 53 aa, Unknown; identical to SEQ ID NO: 112
  ATD27826 125-21712

SEQ ID NO: 426 - protein, 53 aa, Unknown; identical to SEQ ID NO: 112
  AWK28671 125-21712

SEQ ID NO: 427 - protein, 53 aa, Unknown; identical to SEQ ID NO: 112
  QBJ30343 125-217

SEQ ID NO: 428 - protein, 53 aa, Unknown; identical to SEQ ID NO: 112
  AOW83123 125-217

SEQ ID NO: 429 - protein, 53 aa, Unknown; identical to SEQ ID NO: 116
  AXM76265 125-21712

SEQ ID NO: 430 - protein, 53 aa, Unknown; identical to SEQ ID NO: 116
  AUB88429 125-217

SEQ ID NO: 431 - protein, 53 aa, Unknown; identical to SEQ ID NO: 116
  AUB95307 125-217

SEQ ID NO: 432 - protein, 53 aa, Unknown; identical to SEQ ID NO: 116
  AXM57942 125-21712

SEQ ID NO: 433 - protein, 53 aa, Unknown; identical to SEQ ID NO: 116
  AXM62067 125-21712

SEQ ID NO: 434 - protein, 53 aa, Unknown; identical to SEQ ID NO: 116
  AXM73819 125-21712

SEQ ID NO: 435 - protein, 53 aa, Unknown; identical to SEQ ID NO: 116
  AUB98725 125-217

SEQ ID NO: 436 - protein, 53 aa, Unknown; identical to SEQ ID NO: 116
  AQP33203 125-217

SEQ ID NO: 437 - protein, 53 aa, Unknown; identical to SEQ ID NO: 116
  ASG06894 125-21712

SEQ ID NO: 438 - protein, 53 aa, Unknown; identical to SEQ ID NO: 116
  AXM64572 125-21712

SEQ ID NO: 439 - protein, 53 aa, Unknown; identical to SEQ ID NO: 116
  AQP36582 125-21712

SEQ ID NO: 440 - protein, 53 aa, Unknown; identical to SEQ ID NO: 116
  AXM48785 125-21712

SEQ ID NO: 441 - protein, 53 aa, Unknown; identical to SEQ ID NO: 116
  AXM82871 125-21712

SEQ ID NO: 442 - protein, 53 aa, Unknown; identical to SEQ ID NO: 116
  AQM20027 125-21712

SEQ ID NO: 443 - protein, 53 aa, Unknown; identical to SEQ ID NO: 116
  AXM79562 125-21712

SEQ ID NO: 444 - protein, 53 aa, Unknown; identical to SEQ ID NO: 116
  AXM86171 125-217

SEQ ID NO: 445 - protein, 53 aa, Unknown; identical to SEQ ID NO: 116
  AUB91870 125-21712

SEQ ID NO: 446 - protein, 53 aa, Unknown; identical to SEQ ID NO: 116
  AXM55519 125-217

SEQ ID NO: 447 - protein, 53 aa, Unknown; identical to SEQ ID NO: 116
  AXM52183 125-217

SEQ ID NO: 448 - protein, 53 aa, Unknown; identical to SEQ ID NO: 117
  ASU21788 125-217

SEQ ID NO: 449 - protein, 53 aa, Unknown; identical to SEQ ID NO: 117
  AS028701 125-21712

SEQ ID NO: 450 - protein, 53 aa, Unknown
  AZS25716 128-22012
EACIISRKSGERFCLKEGERSGYSLPAYIYGHEVDVEAPQGLGVMLSDWDNLS

SEQ ID NO: 451 - protein, 53 aa, Unknown; identical to SEQ ID NO: 450
  AQM13257 128-22012

SEQ ID NO: 452 - protein, 53 aa, Unknown; identical to SEQ ID NO: 450
  AQM16560 128-220

SEQ ID NO: 453 - protein, 53 aa, Unknown; identical to SEQ ID NO: 450
  AXN04429 128-220

SEQ ID NO: 454 - protein, 53 aa, Unknown
  AQM30209 123-215
EACIVSRENGERFCLKEGERSGYSLPAYIYGHAVDIVAPEGLGVMLSDWDNLS

SEQ ID NO: 455 - protein, 53 aa, Unknown; identical to SEQ ID NO: 454
  ASF99372 123-21512

SEQ ID NO: 456 - protein, 53 aa, Unknown; identical to SEQ ID NO: 454
  ASG03140 123-21512

SEQ ID NO: 457 - protein, 53 aa, Unknown
  AQM02921 123-215
EACIVSRENGERFCLKEGERSGYSLPSYIYGHAVDIVAPEGLGVMLSDWDNLS

SEQ ID NO: 458 - protein, 53 aa, Unknown; identical to SEQ ID NO: 107
  AQL92259 123-215

SEQ ID NO: 459 - protein, 53 aa, Unknown; identical to SEQ ID NO: 107
  AGU58153 188-280

SEQ ID NO: 460 - protein, 53 aa, Unknown; identical to SEQ ID NO: 107
  AQL95928 123-21512

SEQ ID NO: 461 - protein, 53 aa, Unknown; identical to SEQ ID NO: 107
  AXN07827 123-215

SEQ ID NO: 462 - protein, 53 aa, Unknown; identical to SEQ ID NO: 107
  ARV28307 123-215

SEQ ID NO: 463 - protein, 53 aa, Unknown; identical to SEQ ID NO: 107
  AQM63381 123-21512

SEQ ID NO: 464 - protein, 53 aa, Unknown; identical to SEQ ID NO: 107
  AQL61174 123-215

SEQ ID NO: 465 - protein, 53 aa, Unknown; identical to SEQ ID NO: 107
  AXN18035 123-215

SEQ ID NO: 466 - protein, 53 aa, Unknown; identical to SEQ ID NO: 107
  AXN11232 123-21512

SEQ ID NO: 467 - protein, 53 aa, Unknown; identical to SEQ ID NO: 107
  AQM23414 123-215

SEQ ID NO: 468 - protein, 53 aa, Unknown; identical to SEQ ID NO: 107
  AQL68008 123-215

SEQ ID NO: 469 - protein, 53 aa, Unknown; identical to SEQ ID NO: 107
  AQL88731 123-21512

SEQ ID NO: 470 - protein, 53 aa, Unknown; identical to SEQ ID NO: 107
  AQL99395 123-21512

SEQ ID NO: 471 - protein, 53 aa, Unknown; identical to SEQ ID NO: 107
  ANJ22413 123-215

SEQ ID NO: 472 - protein, 53 aa, Unknown; identical to SEQ ID NO: 107
  AXN14636 123-215

SEQ ID NO: 473 - protein, 53 aa, Unknown; identical to SEQ ID NO: 107
  ASF91340 123-215

SEQ ID NO: 474 - protein, 53 aa, Unknown; identical to SEQ ID NO: 107
  COQ49722l123-215

SEQ ID NO: 475 - protein, 53 aa, Unknown; identical to SEQ ID NO: 107
  AVT68620l123-215

SEQ ID NO: 476 - protein, 53 aa, Unknown; identical to SEQ ID NO: 107
  AEH33737l188-280l2

SEQ ID NO: 477 - protein, 53 aa, Unknown; identical to SEQ ID NO: 107
  AQM26877l123-215

SEQ ID NO: 478 - protein, 53 aa, Unknown; identical to SEQ ID NO: 107
  AQL85290l123-215l2

SEQ ID NO: 479 - protein, 53 aa, Unknown; identical to SEQ ID NO: 107
  AQL78381l123-215l2

SEQ ID NO: 480 - protein, 53 aa, Unknown; identical to SEQ ID NO: 107
  AQL71490l123-215l2

SEQ ID NO: 481 - protein, 53 aa, Unknown; identical to SEQ ID NO: 108
  AQL81770l123-215l2

SEQ ID NO: 482 - protein, 53 aa, Unknown; identical to SEQ ID NO: 108
  AQM10034l123-215

SEQ ID NO: 483 - protein, 53 aa, Unknown; identical to SEQ ID NO: 108
  AQL74945l123-215l2

SEQ ID NO: 484 - protein, 53 aa, Unknown; identical to SEQ ID NO: 108
  AQM34697l123-215l2

SEQ ID NO: 485 - protein, 53 aa, Unknown; identical to SEQ ID NO: 108
  AQM06434l123-215l2

SEQ ID NO: 486 - protein, 53 aa, Unknown
  ATC57038l123-215l2
EACIVSRENGERFCLKEGERSGYSLPSYIYGHPVDIVAPEGLGVILSDWDNLS

SEQ ID NO: 487 - protein, 53 aa, Unknown; identical to SEQ ID NO: 104
  AXN33534l125-217l2

SEQ ID NO: 488 - protein, 53 aa, Unknown; identical to SEQ ID NO: 104
  QFT38638l125-217l2

SEQ ID NO: 489 - protein, 53 aa, Unknown; identical to SEQ ID NO: 104
  QGM36824l125-217l2

SEQ ID NO: 490 - protein, 53 aa, Unknown; identical to SEQ ID NO: 104
  QGN72165l125-217l2

SEQ ID NO: 491 - protein, 53 aa, Unknown; identical to SEQ ID NO: 104
  QIJ86227l125-217

SEQ ID NO: 492 - protein, 53 aa, Unknown; identical to SEQ ID NO: 104
  QOU32034l125-217l2

SEQ ID NO: 493 - protein, 53 aa, Unknown; identical to SEQ ID NO: 104
  AIS566931125-217

SEQ ID NO: 494 - protein, 53 aa, Unknown; identical to SEQ ID NO: 104
  AIW218491125-217

SEQ ID NO: 495 - protein, 53 aa, Unknown; identical to SEQ ID NO: 104
  ANW262991125-21712

SEQ ID NO: 496 - protein, 53 aa, Unknown
  ASD69510132-12512
SACIVSRQTQESYCLKAGESSGYSLPSYIYNHEVDVIAPPGLGVMLSDWDNLS

SEQ ID NO: 497 - protein, 53 aa, Unknown
  ATD09504132-12312
SACIVSRQTQESYCLKAGERSGYSLPDYIYNHEVDVIAPPGLGVMLSDWDNLS

SEQ ID NO: 498 - protein, 53 aa, Unknown
  CC058537133-123
KACIVSRDTGAKYCLQAGQRSGYSLPSYIRGHDVDVIAPEGLGVMLSDWDNLS

SEQ ID NO: 499 - protein, 53 aa, Unknown; identical to SEQ ID NO: 498
  BCL68998133-123

SEQ ID NO: 500 - protein, 53 aa, Unknown
  CC0585371130-22212
EACIVSRQTGAEYCLKAGQRSGYSLPYYIRGHDVDVIAPEGLAVMLSDWDNLS

SEQ ID NO: 501 - protein, 53 aa, Unknown; identical to SEQ ID NO: 500
  BCL689981130-22212

SEQ ID NO: 502 - protein, 52 aa, Unknown
  AOY50312129-120
GCIISRLNGEKYCLKVGERSGYSLPSWIYAHPVDVQAPSGVSVMLSDWDNLS

SEQ ID NO: 503 - protein, 52 aa, Unknown; identical to SEQ ID NO: 502
  AOY46705129-12012

SEQ ID NO: 504 - protein, 52 aa, Unknown; identical to SEQ ID NO: 502
  AWK28649129-120

SEQ ID NO: 505 - protein, 52 aa, Unknown; identical to SEQ ID NO: 502
  QAV04291129-120

SEQ ID NO: 506 - protein, 52 aa, Unknown; identical to SEQ ID NO: 502
  QTV07561129-120

SEQ ID NO: 507 - protein, 52 aa, Unknown; identical to SEQ ID NO: 502
  QTV02748129-12012

SEQ ID NO: 508 - protein, 52 aa, Unknown; identical to SEQ ID NO: 502
  QPC54135129-120

SEQ ID NO: 509 - protein, 52 aa, Unknown; identical to SEQ ID NO: 502
  AWK28455129-12012

SEQ ID NO: 510 - protein, 52 aa, Unknown; identical to SEQ ID NO: 502
  AWK28671129-120

SEQ ID NO: 511 - protein, 52 aa, Unknown; identical to SEQ ID NO: 502
  ATV90566129-120

SEQ ID NO: 512 - protein, 52 aa, Unknown; identical to SEQ ID NO: 502
  QNE70179129-120

SEQ ID NO: 513 - protein, 52 aa, Unknown; identical to SEQ ID NO: 502
  QLK90734129-12012

SEQ ID NO: 514 - protein, 52 aa, Unknown; identical to SEQ ID NO: 502
  QKU56298129-12012

SEQ ID NO: 515 - protein, 52 aa, Unknown; identical to SEQ ID NO: 502
  QKU79076129-12012

SEQ ID NO: 516 - protein, 52 aa, Unknown; identical to SEQ ID NO: 502
  QKU59924129-12012

SEQ ID NO: 517 - protein, 52 aa, Unknown; identical to SEQ ID NO: 502
  QKU63560129-12012

SEQ ID NO: 518 - protein, 52 aa, Unknown; identical to SEQ ID NO: 502
  QKU67443129-12012

SEQ ID NO: 519 - protein, 52 aa, Unknown; identical to SEQ ID NO: 502
  QKU71240129-12012

SEQ ID NO: 520 - protein, 52 aa, Unknown; identical to SEQ ID NO: 502
  QKU75185129-120

SEQ ID NO: 521 - protein, 52 aa, Unknown; identical to SEQ ID NO: 502
  AWK28778129-120

SEQ ID NO: 522 - protein, 52 aa, Unknown; identical to SEQ ID NO: 502
  ATV90621129-12012

SEQ ID NO: 523 - protein, 52 aa, Unknown; identical to SEQ ID NO: 502
  QJS78467129-12012

SEQ ID NO: 524 - protein, 52 aa, Unknown; identical to SEQ ID NO: 502
  QJS82039129-12012

SEQ ID NO: 525 - protein, 52 aa, Unknown; identical to SEQ ID NO: 502
  QBJ30343129-12012

SEQ ID NO: 526 - protein, 52 aa, Unknown; identical to SEQ ID NO: 502
  QJS85662129-120

SEQ ID NO: 527 - protein, 52 aa, Unknown; identical to SEQ ID NO: 502
  ATV90551129-120

SEQ ID NO: 528 - protein, 52 aa, Unknown; identical to SEQ ID NO: 502
  APF78461129-120

SEQ ID NO: 529 - protein, 52 aa, Unknown; identical to SEQ ID NO: 502
  QJS92899129-120

SEQ ID NO: 530 - protein, 52 aa, Unknown; identical to SEQ ID NO: 502
  QJS89303129-120

SEQ ID NO: 531 - protein, 52 aa, Unknown; identical to SEQ ID NO: 502
  QHQ89411129-12012

SEQ ID NO: 532 - protein, 52 aa, Unknown; identical to SEQ ID NO: 502
  ATV90597129-120

SEQ ID NO: 533 - protein, 52 aa, Unknown; identical to SEQ ID NO: 502
  AWB71117129-12012

SEQ ID NO: 534 - protein, 52 aa, Unknown; identical to SEQ ID NO: 502
  AK074518129-12012

SEQ ID NO: 535 - protein, 52 aa, Unknown; identical to SEQ ID NO: 502
  ARB81387129-12012

SEQ ID NO: 536 - protein, 52 aa, Unknown; identical to SEQ ID NO: 502
  QE041848129-12012

SEQ ID NO: 537 - protein, 52 aa, Unknown; identical to SEQ ID NO: 502
  ATD27826129-120

SEQ ID NO: 538 - protein, 52 aa, Unknown; identical to SEQ ID NO: 502
  AWK28549129-120

SEQ ID NO: 539 - protein, 52 aa, Unknown; identical to SEQ ID NO: 502
  QHA22490129-120

SEQ ID NO: 540 - protein, 52 aa, Unknown; identical to SEQ ID NO: 502
  QGF31054129-12012

SEQ ID NO: 541 - protein, 52 aa, Unknown; identical to SEQ ID NO: 502
  APF48513129-12012

SEQ ID NO: 542 - protein, 52 aa, Unknown; identical to SEQ ID NO: 502
  AYC05819129-120

SEQ ID NO: 543 - protein, 52 aa, Unknown; identical to SEQ ID NO: 95
  AXM76265 I 29-120

SEQ ID NO: 544 - protein, 52 aa, Unknown; identical to SEQ ID NO: 95
  AUB88429129-12012

SEQ ID NO: 545 - protein, 52 aa, Unknown; identical to SEQ ID NO: 95
  AUB95307129-12012

SEQ ID NO: 546 - protein, 52 aa, Unknown; identical to SEQ ID NO: 95
  AXM57942129-120

SEQ ID NO: 547 - protein, 52 aa, Unknown; identical to SEQ ID NO: 95
  ASU21788 29-12012

SEQ ID NO: 548 - protein, 52 aa, Unknown; identical to SEQ ID NO: 95
  AXM62067 29-120

SEQ ID NO: 549 - protein, 52 aa, Unknown; identical to SEQ ID NO: 95
  AXM73819 29-120

SEQ ID NO: 550 - protein, 52 aa, Unknown; identical to SEQ ID NO: 95
  AUB98725 29-12012

SEQ ID NO: 551 - protein, 52 aa, Unknown; identical to SEQ ID NO: 95
  AQP33203 29-12012

SEQ ID NO: 552 - protein, 52 aa, Unknown; identical to SEQ ID NO: 95
  ASG06894 29-120

SEQ ID NO: 553 - protein, 52 aa, Unknown; identical to SEQ ID NO: 95
  AXM64572 29-120

SEQ ID NO: 554 - protein, 52 aa, Unknown; identical to SEQ ID NO: 95
  AQM20027 29-120

SEQ ID NO: 555 - protein, 52 aa, Unknown; identical to SEQ ID NO: 95
  AXM79562 29-120

SEQ ID NO: 556 - protein, 52 aa, Unknown; identical to SEQ ID NO: 95
  AXM48785 29-120

SEQ ID NO: 557 - protein, 52 aa, Unknown; identical to SEQ ID NO: 95
  AXM86171 29-12012

SEQ ID NO: 558 - protein, 52 aa, Unknown; identical to SEQ ID NO: 95
  AUB91870 29-120

SEQ ID NO: 559 - protein, 52 aa, Unknown; identical to SEQ ID NO: 95
  AQP36582 29-120

SEQ ID NO: 560 - protein, 52 aa, Unknown; identical to SEQ ID NO: 95
  AXM55519 29-12012

SEQ ID NO: 561 - protein, 52 aa, Unknown; identical to SEQ ID NO: 95
  AXM82871 29-120

SEQ ID NO: 562 - protein, 52 aa, Unknown; identical to SEQ ID NO: 95
  AXM52183 29-12012

SEQ ID NO: 563 - protein, 52 aa, Unknown; identical to SEQ ID NO: 95
  AS028701 29-120

SEQ ID NO: 564 - protein, 52 aa, Unknown; identical to SEQ ID NO: 502
  SYZ81941 29-120

SEQ ID NO: 565 - protein, 52 aa, Unknown
  AOW83123 29-12012
GCIISRLNGEKYCLKAGERSGYSLPNWIYAHPVDVQAPSGISVMLSDWDNLS

SEQ ID NO: 566 - protein, 52 aa, Unknown
  AXN33534 29-120
GCIISQQSGEKYCLKAGERSGYSLPNWIYAHPVDVLAPSGVSVMLSDWDNLS

SEQ ID NO: 567 - protein, 52 aa, Unknown; identical to SEQ ID NO: 566
  QOU32034 29-120

SEQ ID NO: 568 - protein, 52 aa, Unknown; identical to SEQ ID NO: 566
  AIS56693 29-12012

SEQ ID NO: 569 - protein, 52 aa, Unknown; identical to SEQ ID NO: 566
  QGN72165 29-120

SEQ ID NO: 570 - protein, 52 aa, Unknown; identical to SEQ ID NO: 566
  QGM36824 29-120

SEQ ID NO: 571 - protein, 52 aa, Unknown; identical to SEQ ID NO: 566
  AIW21849 29-12012

SEQ ID NO: 572 - protein, 52 aa, Unknown; identical to SEQ ID NO: 566
  ANW26299 29-120

SEQ ID NO: 573 - protein, 52 aa, Unknown; identical to SEQ ID NO: 566
  QFT38638 29-120

SEQ ID NO: 574 - protein, 52 aa, Unknown; identical to SEQ ID NO: 566
  QIJ86227 29-12012

SEQ ID NO: 575 - protein, 52 aa, Unknown
  AMG03985129-120
GCIISRLNGEKYCLKAGERSGYSLPNWIYAHPVDVQAPSGISVMLSDWDDLS

SEQ ID NO: 576 - protein, 52 aa, Unknown
  AQM30209126-11812
EGCIISRKTGDKYCLNIQRSEYSLPSWIYNHQVDVLAPSGVSVMLSDWDNLS

SEQ ID NO: 577 - protein, 52 aa, Unknown; identical to SEQ ID NO: 576
  AQL78381126-118

SEQ ID NO: 578 - protein, 52 aa, Unknown; identical to SEQ ID NO: 576
  CDQ49722126-ll812

SEQ ID NO: 579 - protein, 52 aa, Unknown; identical to SEQ ID NO: 576
  ARV28307126-ll812

SEQ ID NO: 580 - protein, 52 aa, Unknown; identical to SEQ ID NO: 576
  AQM63381126-118

SEQ ID NO: 581 - protein, 52 aa, Unknown; identical to SEQ ID NO: 576
  AQM23414126-11812

SEQ ID NO: 582 - protein, 52 aa, Unknown; identical to SEQ ID NO: 576
  ASF91340126-11812

SEQ ID NO: 583 - protein, 52 aa, Unknown; identical to SEQ ID NO: 576
  AXN14636126-11812

SEQ ID NO: 584 - protein, 52 aa, Unknown; identical to SEQ ID NO: 576
  AQM34697126-118

SEQ ID NO: 585 - protein, 52 aa, Unknown; identical to SEQ ID NO: 576
  AQL85290126-118

SEQ ID NO: 586 - protein, 52 aa, Unknown; identical to SEQ ID NO: 576
  AQM26877126-11812

SEQ ID NO: 587 - protein, 52 aa, Unknown; identical to SEQ ID NO: 576
  AQM06434126-118

SEQ ID NO: 588 - protein, 52 aa, Unknown; identical to SEQ ID NO: 576
  AQL99395126-118

SEQ ID NO: 589 - protein, 52 aa, Unknown; identical to SEQ ID NO: 576
  AQM02921126-11812

SEQ ID NO: 590 - protein, 52 aa, Unknown; identical to SEQ ID NO: 576
  ANJ22413126-11812

SEQ ID NO: 591 - protein, 52 aa, Unknown; identical to SEQ ID NO: 576
  AQL88731126-118

SEQ ID NO: 592 - protein, 52 aa, Unknown; identical to SEQ ID NO: 576
  AQL74945126-118

SEQ ID NO: 593 - protein, 52 aa, Unknown; identical to SEQ ID NO: 576
  ASF99372 I 26-118

SEQ ID NO: 594 - protein, 52 aa, Unknown; identical to SEQ ID NO: 576
  AQL92259126-11812

SEQ ID NO: 595 - protein, 52 aa, Unknown; identical to SEQ ID NO: 576
  AQL71490126-118

SEQ ID NO: 596 - protein, 52 aa, Unknown; identical to SEQ ID NO: 576
  AGU58153191-18312

SEQ ID NO: 597 - protein, 52 aa, Unknown; identical to SEQ ID NO: 576
  AEH33737191-183

SEQ ID NO: 598 - protein, 52 aa, Unknown; identical to SEQ ID NO: 576
  AVT68620126-11812

SEQ ID NO: 599 - protein, 52 aa, Unknown; identical to SEQ ID NO: 576
  AQL81770126-118

SEQ ID NO: 600 - protein, 52 aa, Unknown; identical to SEQ ID NO: 576
  AQM10034126-11812

SEQ ID NO: 601 - protein, 52 aa, Unknown; identical to SEQ ID NO: 576
  AQL68008126-11812

SEQ ID NO: 602 - protein, 52 aa, Unknown; identical to SEQ ID NO: 576
  ASG03140126-118

SEQ ID NO: 603 - protein, 52 aa, Unknown; identical to SEQ ID NO: 576
  ATC57038 I 26-118

SEQ ID NO: 604 - protein, 52 aa, Unknown
  AXN11232 I 26-118
EGCIISRKTGDKYCLNIQRSEYSLPNWIYNHQVDVLAPSGVSVMLSDWDNLS

SEQ ID NO: 605 - protein, 52 aa, Unknown; identical to SEQ ID NO: 576
  AXN18035126-11812

SEQ ID NO: 606 - protein, 52 aa, Unknown; identical to SEQ ID NO: 576
  AQL61174126-11812

SEQ ID NO: 607 - protein, 52 aa, Unknown; identical to SEQ ID NO: 576
  AQL95928126-118

SEQ ID NO: 608 - protein, 52 aa, Unknown; identical to SEQ ID NO: 576
  AXN07827126-11812

SEQ ID NO: 609 - protein, 53 aa, Unknown
  AZS25716 I 31-123
EGCIISRETGAKYCLKPGERSGYSLPSWIYNHAVDVLAPSGISVMLSDWDNLS

SEQ ID NO: 610 - protein, 53 aa, Unknown; identical to SEQ ID NO: 609
  AXN04429 31-12312

SEQ ID NO: 611 - protein, 53 aa, Unknown; identical to SEQ ID NO: 609
  AQM13257 31-123

SEQ ID NO: 612 - protein, 53 aa, Unknown; identical to SEQ ID NO: 609
  AQM16560 31-12312

SEQ ID NO: 613 - protein, 53 aa, Unknown
  AIW14640 28-118
EGCIVSLETGEKYCLKVGERSGYSLPAFIYQHDIDVYAAPGTAVMLSDWDNLS

SEQ ID NO: 614 - protein, 52 aa, Unknown
  ASD69510 129-219
QACIRSLDTGDKFCLEAGQRSGYSLSYINKHAVEVIAPPGLGVVLSDWDNLS

SEQ ID NO: 615 - protein, 52 aa, Unknown
  ATD09504 129-219 I 3
QACIRSLDTGDKFCLEAGQRSGYSLNYIIGHAVEVIAPPGLGVVLSDWDNLS

SEQ ID NO: 616 - protein, 56 aa, Unknown
  ASD69510 225-32013
KQACIKSLKTGEFYCLQAGETSGYSLPSYIYEQEHEVEVIAPEGLGVVLSDWDNLS

SEQ ID NO: 617 - protein, 53 aa, Unknown; identical to SEQ ID NO: 85
  ATD09504 226-317

SEQ ID NO: 618 - protein, 53 aa, Unknown
  QDO83225 324-41314
EACIISRITNEKYCLTAGQRSGYALPHYIRGHEVDLIVPDGLKVILSDWDNLS

SEQ ID NO: 619 - protein, 53 aa, Unknown; identical to SEQ ID NO: 77
  AFJ85834 386-47812

SEQ ID NO: 620 - protein, 53 aa, Unknown; identical to SEQ ID NO: 77
  AVR17394 386-47812

SEQ ID NO: 621 - protein, 53 aa, Unknown; identical to SEQ ID NO: 77
  ABO54600 373-465

SEQ ID NO: 622 - protein, 53 aa, Unknown; identical to SEQ ID NO: 77
  AJY057611386-47812

SEQ ID NO: 623 - protein, 53 aa, Unknown; identical to SEQ ID NO: 77
  QTK832281386-47812

SEQ ID NO: 624 - protein, 53 aa, Unknown
  QLI663341374-466
VGCITSLTTSASYCLPAEQQSESSLPSWIYAHDVQVEAAPGTAVILSDSDNLP

SEQ ID NO: 625 - protein, 53 aa, Unknown; identical to SEQ ID NO: 64
  AJY659831420-510

SEQ ID NO: 626 - protein, 53 aa, Unknown; identical to SEQ ID NO: 64
  ACR290101420-510

SEQ ID NO: 627 - protein, 53 aa, Unknown; identical to SEQ ID NO: 64
  QHE091891420-510

SEQ ID NO: 628 - protein, 53 aa, Unknown; identical to SEQ ID NO: 64
  QKM544641420-510

SEQ ID NO: 629 - protein, 53 aa, Unknown; identical to SEQ ID NO: 64
  QKM470461420-510

SEQ ID NO: 630 - protein, 53 aa, Unknown; identical to SEQ ID NO: 64
  QTP327691420-510

SEQ ID NO: 631 - protein, 52 aa, Unknown
  AJK487501422-514
LGVIVSLDAQKYCLPAGQPAVGQLPAWIKGQAVFVQADPGVAVRLSDRADFA

SEQ ID NO: 632 - protein, 52 aa, Unknown
  ALK329901422-51212
LGVIVSLDAQKYCLPAGQPAVGQLPAWIKGQAVFVQADPGVAVRLSDRANFA

SEQ ID NO: 633 - protein, 52 aa, Unknown
  ATY651841281-371
QGCIVSLRTNDSYCLAPGQHAASSTPAIYAHAVRVDAAPGTAVELSDGDGLA

SEQ ID NO: 634 - protein, 51 aa, Unknown
  QDO832251132-221
EACIVSRKSGEKFCLTAGELSYTLPDYIMGDEVDLQVPSGLVMLSDDGSIP

SEQ ID NO: 635 - protein, 51 aa, Unknown
  QDO832251132-221
EACIVSRKSGEKFCLTAGELSYTLPAYIMGDEVDLQIPSGLVMLSDDGSIP

SEQ ID NO: 636 - protein, 52 aa, Unknown; identical to SEQ ID NO: 60
  QDO83225136-12512

SEQ ID NO: 637 - protein, 51 aa, Unknown; identical to SEQ ID NO: 63
  ATY651841377-46512

SEQ ID NO: 638 - protein, 61 aa, Unknown
  AJK487501320-41612
RACLVNVQFGTQYCLPAGQESYNGDRKWPVLFSGWDVRVQADDGVAVRLSTNNPRLLDAAG

SEQ ID NO: 639 - protein, 61 aa, Unknown; identical to SEQ ID NO: 638
  ALK329901320-416

SEQ ID NO: 640 - protein, 40 aa, Unknown; identical to SEQ ID NO: 130
  QCN62469J806-898

SEQ ID NO: 641 - protein, 40 aa, Unknown; identical to SEQ ID NO: 130
  QCN51508[806-898

SEQ ID NO: 642 - protein, 40 aa, Unknown; identical to SEQ ID NO: 130
  QCN67943[806-898

SEQ ID NO: 643 - protein, 40 aa, Unknown; identical to SEQ ID NO: 130
  StcEJ806-898

SEQ ID NO: 644 - protein, 40 aa, Unknown; identical to SEQ ID NO: 130
  QCN73397J806-898

SEQ ID NO: 645 - protein, 40 aa, Unknown; identical to SEQ ID NO: 130
  QCN78874J806-898

SEQ ID NO: 646 - protein, 40 aa, Unknown; identical to SEQ ID NO: 130
  QCH85706J806-898

SEQ ID NO: 647 - protein, 40 aa, Unknown; identical to SEQ ID NO: 130
  QDG03250J806-898

SEQ ID NO: 648 - protein, 40 aa, Unknown; identical to SEQ ID NO: 130
  ABV82981J794-886

SEQ ID NO: 649 - protein, 40 aa, Unknown; identical to SEQ ID NO: 130
  QCM52731J806-898

SEQ ID NO: 650 - protein, 40 aa, Unknown; identical to SEQ ID NO: 130
  QDK10492J794-886

SEQ ID NO: 651 - protein, 40 aa, Unknown; identical to SEQ ID NO: 130
  AOV56816J794-886

SEQ ID NO: 652 - protein, 40 aa, Unknown; identical to SEQ ID NO: 130
  BBC53593J794-886

SEQ ID NO: 653 - protein, 40 aa, Unknown; identical to SEQ ID NO: 130
  AIG71912J794-886

SEQ ID NO: 654 - protein, 40 aa, Unknown; identical to SEQ ID NO: 130
  QCL62420J806-898

SEQ ID NO: 655 - protein, 40 aa, Unknown; identical to SEQ ID NO: 130
  QCM25296J806-898

SEQ ID NO: 656 - protein, 40 aa, Unknown; identical to SEQ ID NO: 130
  ASL56723J794-886

SEQ ID NO: 657 - protein, 40 aa, Unknown; identical to SEQ ID NO: 130
  QCN13065J806-898

SEQ ID NO: 658 - protein, 40 aa, Unknown; identical to SEQ ID NO: 130
  QCL67909J806-898

SEQ ID NO: 659 - protein, 40 aa, Unknown; identical to SEQ ID NO: 130
  QCN02092J806-898

SEQ ID NO: 660 - protein, 40 aa, Unknown; identical to SEQ ID NO: 130
  QCN29449J806-898

SEQ ID NO: 661 - protein, 40 aa, Unknown; identical to SEQ ID NO: 130
  AOV24570J794-886

SEQ ID NO: 662 - protein, 40 aa, Unknown; identical to SEQ ID NO: 130
  QCM19807J806-898

SEQ ID NO: 663 - protein, 40 aa, Unknown; identical to SEQ ID NO: 130
  BBE15735J794-886

SEQ ID NO: 664 - protein, 40 aa, Unknown; identical to SEQ ID NO: 130
  API35393J794-886

SEQ ID NO: 665 - protein, 40 aa, Unknown; identical to SEQ ID NO: 130
  QCN18553J806-898

SEQ ID NO: 666 - protein, 40 aa, Unknown; identical to SEQ ID NO: 130
  AOV40699J794-886

SEQ ID NO: 667 - protein, 40 aa, Unknown; identical to SEQ ID NO: 130
  AOV46047J794-886

SEQ ID NO: 668 - protein, 40 aa, Unknown; identical to SEQ ID NO: 130
  AOV29922J794-886

SEQ ID NO: 669 - protein, 40 aa, Unknown; identical to SEQ ID NO: 130
  API40923 J 794-886

SEQ ID NO: 670 - protein, 40 aa, Unknown; identical to SEQ ID NO: 130
  API13006 J 794-886

SEQ ID NO: 671 - protein, 40 aa, Unknown; identical to SEQ ID NO: 130
  API18559[794-886

SEQ ID NO: 672 - protein, 40 aa, Unknown; identical to SEQ ID NO: 130
  ANW43772J794-886

SEQ ID NO: 673 - protein, 40 aa, Unknown; identical to SEQ ID NO: 130
  AOV35287[794-886

SEQ ID NO: 674 - protein, 40 aa, Unknown; identical to SEQ ID NO: 130
  AOX55262J794-886

SEQ ID NO: 675 - protein, 40 aa, Unknown; identical to SEQ ID NO: 130
  ANG83351J806-898

SEQ ID NO: 676 - protein, 40 aa, Unknown; identical to SEQ ID NO: 130
  APA44909J794-886

SEQ ID NO: 677 - protein, 40 aa, Unknown; identical to SEQ ID NO: 130
  API24204 794-886

SEQ ID NO: 678 - protein, 40 aa, Unknown; identical to SEQ ID NO: 130
  QJZ69887 806-898

SEQ ID NO: 679 - protein, 40 aa, Unknown; identical to SEQ ID NO: 130
  QJZ75438 806-898

SEQ ID NO: 680 - protein, 40 aa, Unknown; identical to SEQ ID NO: 130
  QJZ86374 806-898

SEQ ID NO: 681 - protein, 40 aa, Unknown; identical to SEQ ID NO: 130
  QJZ80864 806-898

SEQ ID NO: 682 - protein, 40 aa, Unknown; identical to SEQ ID NO: 130
  QJZ96901 806-898

SEQ ID NO: 683 - protein, 40 aa, Unknown; identical to SEQ ID NO: 130
  QJZ91663 806-898

SEQ ID NO: 684 - protein, 40 aa, Unknown; identical to SEQ ID NO: 130
  QKB04460 806-898

SEQ ID NO: 685 - protein, 40 aa, Unknown; identical to SEQ ID NO: 130
  QKB15145 806-898

SEQ ID NO: 686 - protein, 40 aa, Unknown; identical to SEQ ID NO: 130
  QKA93622 806-898

SEQ ID NO: 687 - protein, 40 aa, Unknown; identical to SEQ ID NO: 130
  QKA98997 806-898

SEQ ID NO: 688 - protein, 40 aa, Unknown; identical to SEQ ID NO: 130
  QKB09647 806-898

SEQ ID NO: 689 - protein, 40 aa, Unknown; identical to SEQ ID NO: 130
  QKB46000 806-898

SEQ ID NO: 690 - protein, 40 aa, Unknown; identical to SEQ ID NO: 130
  API29691[794-886

SEQ ID NO: 691 - protein, 40 aa, Unknown; identical to SEQ ID NO: 130
  QKB20494[806-898

SEQ ID NO: 692 - protein, 40 aa, Unknown; identical to SEQ ID NO: 130
  ACT75161J802-894

SEQ ID NO: 693 - protein, 40 aa, Unknown; identical to SEQ ID NO: 130
  QJZ43292J806-898

SEQ ID NO: 694 - protein, 40 aa, Unknown; identical to SEQ ID NO: 130
  QJZ59467J806-898

SEQ ID NO: 695 - protein, 40 aa, Unknown; identical to SEQ ID NO: 130
  QCM30790J806-898

SEQ ID NO: 696 - protein, 40 aa, Unknown; identical to SEQ ID NO: 130
  QJZ48663J806-898

SEQ ID NO: 697 - protein, 40 aa, Unknown; identical to SEQ ID NO: 130
  QJZ54127J806-898

SEQ ID NO: 698 - protein, 40 aa, Unknown; identical to SEQ ID NO: 130
  QKA77619 J 806-898

SEQ ID NO: 699 - protein, 40 aa, Unknown; identical to SEQ ID NO: 130
  QKA88237J806-898

SEQ ID NO: 700 - protein, 40 aa, Unknown; identical to SEQ ID NO: 130
  QKA66860J806-898

SEQ ID NO: 701 - protein, 40 aa, Unknown; identical to SEQ ID NO: 130
  QKA82899J806-898

SEQ ID NO: 702 - protein, 40 aa, Unknown; identical to SEQ ID NO: 130
  QKA72230J806-898

SEQ ID NO: 703 - protein, 40 aa, Unknown; identical to SEQ ID NO: 130
  QKA61545J806-898

SEQ ID NO: 704 - protein, 40 aa, Unknown; identical to SEQ ID NO: 130
  QKA24163J806-898

SEQ ID NO: 705 - protein, 40 aa, Unknown; identical to SEQ ID NO: 130
  QKA13146J806-898

SEQ ID NO: 706 - protein, 40 aa, Unknown; identical to SEQ ID NO: 130
  QKA18741J806-898

SEQ ID NO: 707 - protein, 40 aa, Unknown; identical to SEQ ID NO: 130
  QKA02128J806-898

SEQ ID NO: 708 - protein, 40 aa, Unknown; identical to SEQ ID NO: 130
  QKA07646J806-898

SEQ ID NO: 709 - protein, 40 aa, Unknown; identical to SEQ ID NO: 130
  QKA29506J806-898

SEQ ID NO: 710 - protein, 40 aa, Unknown; identical to SEQ ID NO: 130
  QKA56122J806-898

SEQ ID NO: 711 - protein, 40 aa, Unknown; identical to SEQ ID NO: 130
  QKA34897J806-898

SEQ ID NO: 712 - protein, 40 aa, Unknown; identical to SEQ ID NO: 130
  QKA40256J806-898

SEQ ID NO: 713 - protein, 40 aa, Unknown; identical to SEQ ID NO: 130
  QKA45406J806-898

SEQ ID NO: 714 - protein, 40 aa, Unknown; identical to SEQ ID NO: 130
  QKA50931J806-898

SEQ ID NO: 715 - protein, 40 aa, Unknown; identical to SEQ ID NO: 130
  QJZ37882 806-898

SEQ ID NO: 716 - protein, 40 aa, Unknown; identical to SEQ ID NO: 130
  QKB72788 806-898

SEQ ID NO: 717 - protein, 40 aa, Unknown; identical to SEQ ID NO: 130
  QKB62079 806-898

SEQ ID NO: 718 - protein, 40 aa, Unknown; identical to SEQ ID NO: 130
  QKB56772 806-898

SEQ ID NO: 719 - protein, 40 aa, Unknown; identical to SEQ ID NO: 130
  QKB51466 806-898

SEQ ID NO: 720 - protein, 40 aa, Unknown; identical to SEQ ID NO: 130
  QKB78174 806-898

SEQ ID NO: 721 - protein, 40 aa, Unknown; identical to SEQ ID NO: 130
  QKB67394 806-898

SEQ ID NO: 722 - protein, 40 aa, Unknown; identical to SEQ ID NO: 130
  QKB83575 806-898

SEQ ID NO: 723 - protein, 40 aa, Unknown; identical to SEQ ID NO: 130
  QKB94180 806-898

SEQ ID NO: 724 - protein, 40 aa, Unknown; identical to SEQ ID NO: 130
  QKB88849 806-898

SEQ ID NO: 725 - protein, 40 aa, Unknown; identical to SEQ ID NO: 130
  QKB99610 806-898

SEQ ID NO: 726 - protein, 40 aa, Unknown; identical to SEQ ID NO: 130
  QKC04932 806-898

SEQ ID NO: 727 - protein, 40 aa, Unknown; identical to SEQ ID NO: 130
  ANG57690J794-886

SEQ ID NO: 728 - protein, 40 aa, Unknown; identical to SEQ ID NO: 130
  AOX60660J794-886

SEQ ID NO: 729 - protein, 40 aa, Unknown; identical to SEQ ID NO: 130
  QCN07577J806-898

SEQ ID NO: 730 - protein, 40 aa, Unknown; identical to SEQ ID NO: 130
  QCM58218J806-898

SEQ ID NO: 731 - protein, 40 aa, Unknown; identical to SEQ ID NO: 130
  AMW46299J794-886

SEQ ID NO: 732 - protein, 40 aa, Unknown; identical to SEQ ID NO: 130
  ABV82983J794-886

SEQ ID NO: 733 - protein, 40 aa, Unknown; identical to SEQ ID NO: 130
  QCN23962J806-898

SEQ ID NO: 734 - protein, 40 aa, Unknown; identical to SEQ ID NO: 130
  QCM69195J806-898

SEQ ID NO: 735 - protein, 40 aa, Unknown; identical to SEQ ID NO: 130
  ALH93956J794-886

SEQ ID NO: 736 - protein, 40 aa, Unknown; identical to SEQ ID NO: 130
  ABV82982J794-886

SEQ ID NO: 737 - protein, 40 aa, Unknown; identical to SEQ ID NO: 130
  QCL23672J806-898

SEQ ID NO: 738 - protein, 40 aa, Unknown; identical to SEQ ID NO: 130
  QCM36272 J 806-898

SEQ ID NO: 739 - protein, 40 aa, Unknown; identical to SEQ ID NO: 130
  QCM47245J806-898

SEQ ID NO: 740 - protein, 40 aa, Unknown; identical to SEQ ID NO: 130
  AMW46158J794-886

SEQ ID NO: 741 - protein, 40 aa, Unknown; identical to SEQ ID NO: 130
  QHP65898J806-898

SEQ ID NO: 742 - protein, 40 aa, Unknown; identical to SEQ ID NO: 130
  QCM63706J806-898

SEQ ID NO: 743 - protein, 40 aa, Unknown; identical to SEQ ID NO: 130
  ABV829801794-886

SEQ ID NO: 744 - protein, 40 aa, Unknown; identical to SEQ ID NO: 130
  QAV768821806-898

SEQ ID NO: 745 - protein, 40 aa, Unknown; identical to SEQ ID NO: 130
  AOV514591794-886

SEQ ID NO: 746 - protein, 40 aa, Unknown; identical to SEQ ID NO: 130
  QHG469971806-898

SEQ ID NO: 747 - protein, 40 aa, Unknown; identical to SEQ ID NO: 130
  QCM911141806-898

SEQ ID NO: 748 - protein, 40 aa, Unknown; identical to SEQ ID NO: 130
  ANG77653 I 806-898

SEQ ID NO: 749 - protein, 40 aa, Unknown; identical to SEQ ID NO: 130
  QCM966031806-898

SEQ ID NO: 750 - protein, 40 aa, Unknown; identical to SEQ ID NO: 130
  QGU969761806-898

SEQ ID NO: 751 - protein, 40 aa, Unknown; identical to SEQ ID NO: 130
  QCN349351806-898

SEQ ID NO: 752 - protein, 40 aa, Unknown; identical to SEQ ID NO: 130
  QCM417591806-898

SEQ ID NO: 753 - protein, 40 aa, Unknown; identical to SEQ ID NO: 130
  API074201794-886

SEQ ID NO: 754 - protein, 40 aa, Unknown; identical to SEQ ID NO: 130
  QCL456201806-898

SEQ ID NO: 755 - protein, 40 aa, Unknown; identical to SEQ ID NO: 130
  QCM856231806-898

SEQ ID NO: 756 - protein, 40 aa, Unknown; identical to SEQ ID NO: 130
  QCL569271806-898

SEQ ID NO: 757 - protein, 40 aa, Unknown; identical to SEQ ID NO: 130
  QCN460351806-898

SEQ ID NO: 758 - protein, 40 aa, Unknown; identical to SEQ ID NO: 130
  QGK028781806-898

SEQ ID NO: 759 - protein, 40 aa, Unknown; identical to SEQ ID NO: 130
  QGJ261551806-898

SEQ ID NO: 760 - protein, 40 aa, Unknown; identical to SEQ ID NO: 130
  QGG889201806-898

SEQ ID NO: 761 - protein, 40 aa, Unknown; identical to SEQ ID NO: 130
  QGF188841806-898

SEQ ID NO: 762 - protein, 40 aa, Unknown; identical to SEQ ID NO: 130
  QCL29107 I 806-898

SEQ ID NO: 763 - protein, 40 aa, Unknown; identical to SEQ ID NO: 130
  QCV204521806-898

SEQ ID NO: 764 - protein, 40 aa, Unknown; identical to SEQ ID NO: 130
  QFW541911806-898

SEQ ID NO: 765 - protein, 40 aa, Unknown; identical to SEQ ID NO: 130
  QFV788761806-898

SEQ ID NO: 766 - protein, 40 aa, Unknown; identical to SEQ ID NO: 130
  QFW206011806-898

SEQ ID NO: 767 - protein, 40 aa, Unknown; identical to SEQ ID NO: 130
  QFW017561806-898

SEQ ID NO: 768 - protein, 40 aa, Unknown; identical to SEQ ID NO: 130
  QFX42193 806- 898

SEQ ID NO: 769 - protein, 40 aa, Unknown; identical to SEQ ID NO: 130
  QFX11662 806-898

SEQ ID NO: 770 - protein, 40 aa, Unknown; identical to SEQ ID NO: 130
  QCL51292 806-898

SEQ ID NO: 771 - protein, 40 aa, Unknown; identical to SEQ ID NO: 130
  QCN40485 806-898

SEQ ID NO: 772 - protein, 40 aa, Unknown; identical to SEQ ID NO: 130
  QFH12268 806-898

SEQ ID NO: 773 - protein, 40 aa, Unknown; identical to SEQ ID NO: 130
  QFH28434 806-898

SEQ ID NO: 774 - protein, 40 aa, Unknown; identical to SEQ ID NO: 130
  QFH17708 806-898

SEQ ID NO: 775 - protein, 40 aa, Unknown; identical to SEQ ID NO: 130
  QFH22967 806-898

SEQ ID NO: 776 - protein, 40 aa, Unknown; identical to SEQ ID NO: 130
  QFH06760 806-898

SEQ ID NO: 777 - protein, 40 aa, Unknown; identical to SEQ ID NO: 130
  QFH33808 806- 898

SEQ ID NO: 778 - protein, 40 aa, Unknown; identical to SEQ ID NO: 130
  QFG95894 806-898

SEQ ID NO: 779 - protein, 40 aa, Unknown; identical to SEQ ID NO: 130
  QFG90630 806-898

SEQ ID NO: 780 - protein, 40 aa, Unknown; identical to SEQ ID NO: 130
  QFG85359 806-898

SEQ ID NO: 781 - protein, 40 aa, Unknown; identical to SEQ ID NO: 130
  QFH01344 806-898

SEQ ID NO: 782 - protein, 40 aa, Unknown; identical to SEQ ID NO: 130
  QCL34540 806-898

SEQ ID NO: 783 - protein, 40 aa, Unknown; identical to SEQ ID NO: 130
  QCV10392 806-898

SEQ ID NO: 784 - protein, 40 aa, Unknown; identical to SEQ ID NO: 130
  AJA29645 806-898

SEQ ID NO: 785 - protein, 40 aa, Unknown; identical to SEQ ID NO: 130
  AFJ320911806-898

SEQ ID NO: 786 - protein, 40 aa, Unknown; identical to SEQ ID NO: 130
  QCL400521806-898

SEQ ID NO: 787 - protein, 40 aa, Unknown; identical to SEQ ID NO: 130
  QCM801441806-898

SEQ ID NO: 788 - protein, 40 aa, Unknown; identical to SEQ ID NO: 130
  ACI345171806-898

SEQ ID NO: 789 - protein, 40 aa, Unknown; identical to SEQ ID NO: 130
  ASE511651806-898

SEQ ID NO: 790 - protein, 40 aa, Unknown; identical to SEQ ID NO: 130
  QCM746671806-898

SEQ ID NO: 791 - protein, 40 aa, Unknown; identical to SEQ ID NO: 130
  AIF97136 I 806-898

SEQ ID NO: 792 - protein, 40 aa, Unknown; identical to SEQ ID NO: 130
  AAC700991806-898

SEQ ID NO: 793 - protein, 40 aa, Unknown; identical to SEQ ID NO: 130
  QCN569841806-898

SEQ ID NO: 794 - protein, 40 aa, Unknown
  QHF669851806-898
YNRIGEFVGNVNPTDMKKVKAWNGQYLDFSKPRSMRVVYK

SEQ ID NO: 795 - protein, 40 aa, Unknown
  QIC005991794-886
YNRIGEFVGNVYPNDMKKVKAWNGQYLDFSKPRSMRVVYK

SEQ ID NO: 796 - protein, 40 aa, Unknown
  AEZ43677 I 794-886
YNRIGEFVGNVNPADMKKVKAWNGQYLDFSKPRSMRVVNK

SEQ ID NO: 797 - protein, 40 aa, Unknown; identical to SEQ ID NO: 796
  ARD706521794-886

SEQ ID NO: 798 - protein, 40 aa, Unknown; identical to SEQ ID NO: 796
  QKB258241794-886

SEQ ID NO: 799 - protein, 40 aa, Unknown; identical to SEQ ID NO: 796
  QKB409071794-886

SEQ ID NO: 800 - protein, 40 aa, Unknown; identical to SEQ ID NO: 796
  QJZ644371794-886

SEQ ID NO: 801 - protein, 40 aa, Unknown; identical to SEQ ID NO: 796
  ADD597031794-886

SEQ ID NO: 802 - protein, 40 aa, Unknown; identical to SEQ ID NO: 796
  ANE680711794-886

SEQ ID NO: 803 - protein, 40 aa, Unknown; identical to SEQ ID NO: 796
  BAI339381794-886

SEQ ID NO: 804 - protein, 40 aa, Unknown; identical to SEQ ID NO: 796
  QST308421794-886

SEQ ID NO: 805 - protein, 40 aa, Unknown; identical to SEQ ID NO: 796
  QST401551794-886

SEQ ID NO: 806 - protein, 40 aa, Unknown; identical to SEQ ID NO: 796
  AUK246521794-886

SEQ ID NO: 807 - protein, 40 aa, Unknown; identical to SEQ ID NO: 796
  AUK195261794-886

SEQ ID NO: 808 - protein, 40 aa, Unknown; identical to SEQ ID NO: 796
  QCH913861135-227

SEQ ID NO: 809 - protein, 40 aa, Unknown; identical to SEQ ID NO: 796
  AUK145111794-886

SEQ ID NO: 810 - protein, 40 aa, Unknown; identical to SEQ ID NO: 796
  QJQ716491794-886

SEQ ID NO: 811 - protein, 40 aa, Unknown; identical to SEQ ID NO: 796
  QCH700401794-886

SEQ ID NO: 812 - protein, 40 aa, Unknown; identical to SEQ ID NO: 796
  AHG180221794-886

SEQ ID NO: 813 - protein, 40 aa, Unknown; identical to SEQ ID NO: 796
  ASJ465001794-886

SEQ ID NO: 814 - protein, 40 aa, Unknown; identical to SEQ ID NO: 796
  QHD148991794-886

SEQ ID NO: 815 - protein, 40 aa, Unknown; identical to SEQ ID NO: 796
  AHY684171794-886

SEQ ID NO: 816 - protein, 40 aa, Unknown; identical to SEQ ID NO: 796
  CAP162611794-886

SEQ ID NO: 817 - protein, 40 aa, Unknown; identical to SEQ ID NO: 796
  QGQ437851794-886

SEQ ID NO: 818 - protein, 40 aa, Unknown
  AMB568341793-885
YNRIGEFVGSVSPGEMKKVKAWNGQYLDFSKPRSMRVVSN

SEQ ID NO: 819 - protein, 40 aa, Unknown; identical to SEQ ID NO: 818
  ANP053681793-885

SEQ ID NO: 820 - protein, 40 aa, Unknown
  ACK488121793-885
YNRIGEFVGSVGTNEMKKVKAWNGQYLDFSKPRSMRVVSN

SEQ ID NO: 821 - protein, 40 aa, Unknown; identical to SEQ ID NO: 820
  ADT96714 I 793- 885

SEQ ID NO: 822 - protein, 40 aa, Unknown; identical to SEQ ID NO: 820
  AVE263071793- 885

SEQ ID NO: 823 - protein, 40 aa, Unknown
  QBX769461795-887
YSRIGEFVGSVGTHEMKKVKAWNGQYLDFSKPRSMRVVSN

SEQ ID NO: 824 - protein, 40 aa, Unknown; identical to SEQ ID NO: 823
  QBX722461795-887

SEQ ID NO: 825 - protein, 38 aa, Unknown; identical to SEQ ID NO: 135
  AUM108351793-883

SEQ ID NO: 826 - protein, 40 aa, Unknown
  AHG208821791-883
YSRVGEFIGNVATSELKNVRAWNGMYLDFDKPKSMRVVSK

SEQ ID NO: 827 - protein, 40 aa, Unknown; identical to SEQ ID NO: 141
  AFJ858341290-382

SEQ ID NO: 828 - protein, 40 aa, Unknown; identical to SEQ ID NO: 141
  AVR173941290-382

SEQ ID NO: 829 - protein, 40 aa, Unknown; identical to SEQ ID NO: 141
  QTK83228i290-382

SEQ ID NO: 830 - protein, 40 aa, Unknown; identical to SEQ ID NO: 141
  ABO546001277-36912

SEQ ID NO: 831 - protein, 40 aa, Unknown; identical to SEQ ID NO: 141
  AJY057611290-382

SEQ ID NO: 832 - protein, 38 aa, Unknown; identical to SEQ ID NO: 140
  QLI663341278-36812

SEQ ID NO: 833 - protein, 38 aa, Unknown; identical to SEQ ID NO: 152
  AVA370311294-384

SEQ ID NO: 834 - protein, 38 aa, Unknown; identical to SEQ ID NO: 152
  QBP110971294- 384

SEQ ID NO: 835 - protein, 38 aa, Unknown
  ABF09969i285- 375
YHRLAEFVGTVENDKLRAVKAHNGETLDFSKPRSMRVA

SEQ ID NO: 836 - protein, 38 aa, Unknown; identical to SEQ ID NO: 835
  QGS292211285- 375

SEQ ID NO: 837 - protein, 40 aa, Unknown; identical to SEQ ID NO: 144
  AVA370311390- 48212

SEQ ID NO: 838 - protein, 40 aa, Unknown; identical to SEQ ID NO: 144
  QBP110971390- 48212

SEQ ID NO: 839 - protein, 40 aa, Unknown; identical to SEQ ID NO: 144
  ABF099691381-47312

SEQ ID NO: 840 - protein, 40 aa, Unknown; identical to SEQ ID NO: 144
  QGS292211381- 47312

SEQ ID NO: 841 - protein, 40 aa, Unknown; identical to SEQ ID NO: 176
  AEA78065154- 146

SEQ ID NO: 842 - protein, 40 aa, Unknown; identical to SEQ ID NO: 176
  AWB711171125-217

SEQ ID NO: 843 - protein, 40 aa, Unknown; identical to SEQ ID NO: 176
  QEO418481125-217

SEQ ID NO: 844 - protein, 40 aa, Unknown; identical to SEQ ID NO: 176
  QGF310541125-217

SEQ ID NO: 845 - protein, 40 aa, Unknown; identical to SEQ ID NO: 176
  QHA224901125-21712

SEQ ID NO: 846 - protein, 40 aa, Unknown; identical to SEQ ID NO: 176
  QHQ894111125-217

SEQ ID NO: 847 - protein, 40 aa, Unknown; identical to SEQ ID NO: 176
  QJS893031125-21712

SEQ ID NO: 848 - protein, 40 aa, Unknown; identical to SEQ ID NO: 176
  QJS928991125-21712

SEQ ID NO: 849 - protein, 40 aa, Unknown; identical to SEQ ID NO: 176
  QJS856621125-21712

SEQ ID NO: 850 - protein, 40 aa, Unknown; identical to SEQ ID NO: 176
  QJS820391125-217

SEQ ID NO: 851 - protein, 40 aa, Unknown; identical to SEQ ID NO: 176
  QJS784671125-217

SEQ ID NO: 852 - protein, 40 aa, Unknown; identical to SEQ ID NO: 176
  QKU751851125-21712

SEQ ID NO: 853 - protein, 40 aa, Unknown; identical to SEQ ID NO: 176
  QKU712401125-217

SEQ ID NO: 854 - protein, 40 aa, Unknown; identical to SEQ ID NO: 176
  QKU674431125-217

SEQ ID NO: 855 - protein, 40 aa, Unknown; identical to SEQ ID NO: 176
  QKU635601125-217

SEQ ID NO: 856 - protein, 40 aa, Unknown; identical to SEQ ID NO: 176
  QKU599241125-217

SEQ ID NO: 857 - protein, 40 aa, Unknown; identical to SEQ ID NO: 176
  QKU790761125-217

SEQ ID NO: 858 - protein, 40 aa, Unknown; identical to SEQ ID NO: 176
  QKU562981125-217

SEQ ID NO: 859 - protein, 40 aa, Unknown; identical to SEQ ID NO: 176
  QLK907341125-217

SEQ ID NO: 860 - protein, 40 aa, Unknown; identical to SEQ ID NO: 176
  QNE70179 125-21712

SEQ ID NO: 861 - protein, 40 aa, Unknown; identical to SEQ ID NO: 176
  QPC54135 125-21712

SEQ ID NO: 862 - protein, 40 aa, Unknown; identical to SEQ ID NO: 176
  QTV07561 125-21712

SEQ ID NO: 863 - protein, 40 aa, Unknown; identical to SEQ ID NO: 176
  QTV02748 125-217

SEQ ID NO: 864 - protein, 40 aa, Unknown; identical to SEQ ID NO: 176
  AOY50312 125-21712

SEQ ID NO: 865 - protein, 40 aa, Unknown; identical to SEQ ID NO: 176
  AYC05819 125-21712

SEQ ID NO: 866 - protein, 40 aa, Unknown; identical to SEQ ID NO: 176
  AOY46705 125-217

SEQ ID NO: 867 - protein, 40 aa, Unknown; identical to SEQ ID NO: 176
  AWK28649 125-21712

SEQ ID NO: 868 - protein, 40 aa, Unknown; identical to SEQ ID NO: 176
  AWK28455 125-217

SEQ ID NO: 869 - protein, 40 aa, Unknown; identical to SEQ ID NO: 176
  ATV90566 125-21712

SEQ ID NO: 870 - protein, 40 aa, Unknown; identical to SEQ ID NO: 176
  ATV90551 125-21712

SEQ ID NO: 871 - protein, 40 aa, Unknown; identical to SEQ ID NO: 176
  APF78461 125-21712

SEQ ID NO: 872 - protein, 40 aa, Unknown; identical to SEQ ID NO: 176
  ATV90597 125-21712

SEQ ID NO: 873 - protein, 40 aa, Unknown; identical to SEQ ID NO: 176
  AWK285491125-21712

SEQ ID NO: 874 - protein, 40 aa, Unknown; identical to SEQ ID NO: 176
  APF485131125-217

SEQ ID NO: 875 - protein, 40 aa, Unknown; identical to SEQ ID NO: 176
  ARB813871125-217

SEQ ID NO: 876 - protein, 40 aa, Unknown; identical to SEQ ID NO: 178
  ATV906211125-217

SEQ ID NO: 877 - protein, 40 aa, Unknown; identical to SEQ ID NO: 178
  AWK287781125-21712

SEQ ID NO: 878 - protein, 40 aa, Unknown; identical to SEQ ID NO: 178
  QAV042911125-21712

SEQ ID NO: 879 - protein, 40 aa, Unknown; identical to SEQ ID NO: 178
  SYZ819411125-21712

SEQ ID NO: 880 - protein, 40 aa, Unknown; identical to SEQ ID NO: 179
  AK0745181125-217

SEQ ID NO: 881 - protein, 40 aa, Unknown; identical to SEQ ID NO: 176
  ATD278261125-21712

SEQ ID NO: 882 - protein, 40 aa, Unknown; identical to SEQ ID NO: 177
  ATD278261125-21712

SEQ ID NO: 883 - protein, 40 aa, Unknown; identical to SEQ ID NO: 177
  QBJ303431125-217

SEQ ID NO: 884 - protein, 40 aa, Unknown; identical to SEQ ID NO: 175
  AOW831231125-217

SEQ ID NO: 885 - protein, 40 aa, Unknown; identical to SEQ ID NO: 181
  AXM762651125-21712

SEQ ID NO: 886 - protein, 40 aa, Unknown; identical to SEQ ID NO: 181
  AUB884291125-217

SEQ ID NO: 887 - protein, 40 aa, Unknown; identical to SEQ ID NO: 181
  AUB953071125-217

SEQ ID NO: 888 - protein, 40 aa, Unknown; identical to SEQ ID NO: 181
  AXM579421125-21712

SEQ ID NO: 889 - protein, 40 aa, Unknown; identical to SEQ ID NO: 181
  AXM620671125-21712

SEQ ID NO: 890 - protein, 40 aa, Unknown; identical to SEQ ID NO: 181
  AXM738191125-21712

SEQ ID NO: 891 - protein, 40 aa, Unknown; identical to SEQ ID NO: 181
  AUB987251125-217

SEQ ID NO: 892 - protein, 40 aa, Unknown; identical to SEQ ID NO: 181
  AQP332031125-217

SEQ ID NO: 893 - protein, 40 aa, Unknown; identical to SEQ ID NO: 181
  ASG068941125-21712

SEQ ID NO: 894 - protein, 40 aa, Unknown; identical to SEQ ID NO: 181
  AXM645721125-21712

SEQ ID NO: 895 - protein, 40 aa, Unknown; identical to SEQ ID NO: 181
  AXM487851125-21712

SEQ ID NO: 896 - protein, 40 aa, Unknown; identical to SEQ ID NO: 181
  AXM828711125-21712

SEQ ID NO: 897 - protein, 40 aa, Unknown; identical to SEQ ID NO: 181
  AXM828711125-21712

SEQ ID NO: 898 - protein, 40 aa, Unknown; identical to SEQ ID NO: 181
  AQM200271125-21712

SEQ ID NO: 899 - protein, 40 aa, Unknown; identical to SEQ ID NO: 181
  AXM795621125-21712

SEQ ID NO: 900 - protein, 40 aa, Unknown; identical to SEQ ID NO: 181
  AXM861711125-217

SEQ ID NO: 901 - protein, 40 aa, Unknown; identical to SEQ ID NO: 181
  AUB918701125-21712

SEQ ID NO: 902 - protein, 40 aa, Unknown; identical to SEQ ID NO: 181
  AXM555191125-217

SEQ ID NO: 903 - protein, 40 aa, Unknown; identical to SEQ ID NO: 181
  AXM521831125-217

SEQ ID NO: 904 - protein, 40 aa, Unknown
  ASU217881125-217
YNRLAVFGGHTQNEQMRAVTAYNGETLDFSKPRSMRVVPY

SEQ ID NO: 905 - protein, 40 aa, Unknown; identical to SEQ ID NO: 904
  AS0287011125-21712

SEQ ID NO: 906 - protein, 41 aa, Unknown
  AZS257161128-22012
YNRLAVFGGHDTASSLLNAVKAYNGEILDFSHPHSMRVVPY

SEQ ID NO: 907 - protein, 41 aa, Unknown; identical to SEQ ID NO: 906
  AQM132571128-22012

SEQ ID NO: 908 - protein, 41 aa, Unknown; identical to SEQ ID NO: 906
  AQM165601128-220

SEQ ID NO: 909 - protein, 41 aa, Unknown; identical to SEQ ID NO: 906
  AXN044291128-220

SEQ ID NO: 910 - protein, 40 aa, Unknown; identical to SEQ ID NO: 171
  AQM302091123-215

SEQ ID NO: 911 - protein, 40 aa, Unknown; identical to SEQ ID NO: 171
  ASF993721123-21512

SEQ ID NO: 912 - protein, 40 aa, Unknown; identical to SEQ ID NO: 171
  ASG031401123-21512

SEQ ID NO: 913 - protein, 40 aa, Unknown; identical to SEQ ID NO: 171
  AQM029211123-215

SEQ ID NO: 914 - protein, 40 aa, Unknown; identical to SEQ ID NO: 172
  AQL922591123-215

SEQ ID NO: 915 - protein, 40 aa, Unknown; identical to SEQ ID NO: 172
  AGU581531188-280

SEQ ID NO: 916 - protein, 40 aa, Unknown; identical to SEQ ID NO: 172
  AQL959281123-21512

SEQ ID NO: 917 - protein, 40 aa, Unknown; identical to SEQ ID NO: 172
  AXN078271123-215

SEQ ID NO: 918 - protein, 40 aa, Unknown; identical to SEQ ID NO: 172
  ARV283071123-215

SEQ ID NO: 919 - protein, 40 aa, Unknown; identical to SEQ ID NO: 172
  AQM633811123-21512

SEQ ID NO: 920 - protein, 40 aa, Unknown; identical to SEQ ID NO: 172
  AQL611741123-215

SEQ ID NO: 921 - protein, 40 aa, Unknown; identical to SEQ ID NO: 172
  AXN180351123-215

SEQ ID NO: 922 - protein, 40 aa, Unknown; identical to SEQ ID NO: 172
  AXN112321123-21512

SEQ ID NO: 923 - protein, 40 aa, Unknown; identical to SEQ ID NO: 172
  AQM234141123-215

SEQ ID NO: 924 - protein, 40 aa, Unknown; identical to SEQ ID NO: 172
  AQL680081123-215

SEQ ID NO: 925 - protein, 40 aa, Unknown; identical to SEQ ID NO: 172
  AQL887311123-21512

SEQ ID NO: 926 - protein, 40 aa, Unknown; identical to SEQ ID NO: 172
  AQL993951123-21512

SEQ ID NO: 927 - protein, 40 aa, Unknown; identical to SEQ ID NO: 172
  ANJ224131123- 215

SEQ ID NO: 928 - protein, 40 aa, Unknown; identical to SEQ ID NO: 172
  AXN146361123-215

SEQ ID NO: 929 - protein, 40 aa, Unknown; identical to SEQ ID NO: 172
  ASF913401123-215

SEQ ID NO: 930 - protein, 40 aa, Unknown; identical to SEQ ID NO: 172
  CDQ497221123-215

SEQ ID NO: 931 - protein, 40 aa, Unknown; identical to SEQ ID NO: 172
  AVT686201123- 215

SEQ ID NO: 932 - protein, 40 aa, Unknown; identical to SEQ ID NO: 172
  AEH337371188-28012

SEQ ID NO: 933 - protein, 40 aa, Unknown; identical to SEQ ID NO: 172
  AQM268771123-215

SEQ ID NO: 934 - protein, 40 aa, Unknown; identical to SEQ ID NO: 172
  AQL852901123-21512

SEQ ID NO: 935 - protein, 40 aa, Unknown; identical to SEQ ID NO: 172
  AQL783811123-21512

SEQ ID NO: 936 - protein, 40 aa, Unknown; identical to SEQ ID NO: 172
  AQL714901123-21512

SEQ ID NO: 937 - protein, 40 aa, Unknown; identical to SEQ ID NO: 172
  AQL817701123-21512

SEQ ID NO: 938 - protein, 40 aa, Unknown; identical to SEQ ID NO: 172
  AQM100341123-215

SEQ ID NO: 939 - protein, 40 aa, Unknown; identical to SEQ ID NO: 172
  AQL749451123-21512

SEQ ID NO: 940 - protein, 40 aa, Unknown; identical to SEQ ID NO: 172
  AQM346971123-21512

SEQ ID NO: 941 - protein, 40 aa, Unknown; identical to SEQ ID NO: 172
  AQM064341123-21512

SEQ ID NO: 942 - protein, 40 aa, Unknown
  ATC570381123-21512
YNRLAVFDGNTSNAQLKSVKAYNGELLDFSNPRSMRVLSF

SEQ ID NO: 943 - protein, 40 aa, Unknown; identical to SEQ ID NO: 168
  AXN335341125-21712

SEQ ID NO: 944 - protein, 40 aa, Unknown; identical to SEQ ID NO: 168
  QFT386381125-21712

SEQ ID NO: 945 - protein, 40 aa, Unknown; identical to SEQ ID NO: 168
  QGM368241125-21712

SEQ ID NO: 946 - protein, 40 aa, Unknown; identical to SEQ ID NO: 168
  QGN721651125-21712

SEQ ID NO: 947 - protein, 40 aa, Unknown; identical to SEQ ID NO: 168
  QIJ862271125-217

SEQ ID NO: 948 - protein, 40 aa, Unknown; identical to SEQ ID NO: 168
  QOU320341125-21712

SEQ ID NO: 949 - protein, 40 aa, Unknown; identical to SEQ ID NO: 168
  AIS566931125-217

SEQ ID NO: 950 - protein, 40 aa, Unknown; identical to SEQ ID NO: 168
  AIW218491125-217

SEQ ID NO: 951 - protein, 40 aa, Unknown; identical to SEQ ID NO: 168
  ANW262991125-21712

SEQ ID NO: 952 - protein, 41 aa, Unknown; identical to SEQ ID NO: 155
  ASD69510132-12512

SEQ ID NO: 953 - protein, 39 aa, Unknown
  ATD09504132-12312
YNRIATFTGYTNNAQLKQVTAKNGQELDFSHPRSMRVVS

SEQ ID NO: 954 - protein, 38 aa, Unknown
  CCO58537133-123
YNRLAVFERHTHNEAMEHVLARNGQYLDFSNPRSMRVV

SEQ ID NO: 955 - protein, 38 aa, Unknown; identical to SEQ ID NO: 954
  BCL68998133-123

SEQ ID NO: 956 - protein, 40 aa, Unknown; identical to SEQ ID NO: 153
  CCO58537 1130-22212

SEQ ID NO: 957 - protein, 40 aa, Unknown; identical to SEQ ID NO: 153
  BCL689981130-22212

SEQ ID NO: 958 - protein, 40 aa, Unknown; identical to SEQ ID NO: 163
  AOY50312129-120

SEQ ID NO: 959 - protein, 40 aa, Unknown; identical to SEQ ID NO: 163
  AOY46705129-12012

SEQ ID NO: 960 - protein, 40 aa, Unknown; identical to SEQ ID NO: 163
  AWK28649129-120

SEQ ID NO: 961 - protein, 40 aa, Unknown; identical to SEQ ID NO: 163
  QAV04291129-120

SEQ ID NO: 962 - protein, 40 aa, Unknown; identical to SEQ ID NO: 163
  QTV07561129-120

SEQ ID NO: 963 - protein, 40 aa, Unknown; identical to SEQ ID NO: 163
  QTV02748129-12012

SEQ ID NO: 964 - protein, 40 aa, Unknown; identical to SEQ ID NO: 163
  QPC54135129-120

SEQ ID NO: 965 - protein, 40 aa, Unknown; identical to SEQ ID NO: 163
  AWK28455129-12012

SEQ ID NO: 966 - protein, 40 aa, Unknown; identical to SEQ ID NO: 163
  AWK28671129-120

SEQ ID NO: 967 - protein, 40 aa, Unknown; identical to SEQ ID NO: 163
  ATV90566129-120

SEQ ID NO: 968 - protein, 40 aa, Unknown; identical to SEQ ID NO: 163
  QNE70179129-120

SEQ ID NO: 969 - protein, 40 aa, Unknown; identical to SEQ ID NO: 163
  QLK90734129-12012

SEQ ID NO: 970 - protein, 40 aa, Unknown; identical to SEQ ID NO: 163
  QKU56298129-12012

SEQ ID NO: 971 - protein, 40 aa, Unknown; identical to SEQ ID NO: 163
  QKU790761 29-120 12

SEQ ID NO: 972 - protein, 40 aa, Unknown; identical to SEQ ID NO: 163
  QKU59924129-12012

SEQ ID NO: 973 - protein, 40 aa, Unknown; identical to SEQ ID NO: 163
  QKU63560129-12012

SEQ ID NO: 974 - protein, 40 aa, Unknown; identical to SEQ ID NO: 163
  QKU67443129-12012

SEQ ID NO: 975 - protein, 40 aa, Unknown; identical to SEQ ID NO: 163
  QKU71240129-12012

SEQ ID NO: 976 - protein, 40 aa, Unknown; identical to SEQ ID NO: 163
  QKU75185129-120

SEQ ID NO: 977 - protein, 40 aa, Unknown; identical to SEQ ID NO: 163
  AWK28778129-120

SEQ ID NO: 978 - protein, 40 aa, Unknown; identical to SEQ ID NO: 163
  ATV90621129-12012

SEQ ID NO: 979 - protein, 40 aa, Unknown; identical to SEQ ID NO: 163
  QJS78467129-12012

SEQ ID NO: 980 - protein, 40 aa, Unknown; identical to SEQ ID NO: 163
  QJS82039129-12012

SEQ ID NO: 981 - protein, 40 aa, Unknown; identical to SEQ ID NO: 163
  QBJ30343 129-12012

SEQ ID NO: 982 - protein, 40 aa, Unknown; identical to SEQ ID NO: 163
  QJS85662129-120

SEQ ID NO: 983 - protein, 40 aa, Unknown; identical to SEQ ID NO: 163
  ATV90551129-120

SEQ ID NO: 984 - protein, 40 aa, Unknown; identical to SEQ ID NO: 163
  APF78461129-120

SEQ ID NO: 985 - protein, 40 aa, Unknown; identical to SEQ ID NO: 163
  QJS92899 I 29-120

SEQ ID NO: 986 - protein, 40 aa, Unknown; identical to SEQ ID NO: 163
  QJS89303 129-120

SEQ ID NO: 987 - protein, 40 aa, Unknown; identical to SEQ ID NO: 163
  QHQ89411129-120 12

SEQ ID NO: 988 - protein, 40 aa, Unknown; identical to SEQ ID NO: 163
  ATV90597129-120

SEQ ID NO: 989 - protein, 40 aa, Unknown; identical to SEQ ID NO: 163
  AWB71117129-12012

SEQ ID NO: 990 - protein, 40 aa, Unknown; identical to SEQ ID NO: 163
  AK074518129-12012

SEQ ID NO: 991 - protein, 40 aa, Unknown; identical to SEQ ID NO: 163
  ARB81387129-12012

SEQ ID NO: 992 - protein, 40 aa, Unknown; identical to SEQ ID NO: 163
  QE041848129-12012

SEQ ID NO: 993 - protein, 40 aa, Unknown; identical to SEQ ID NO: 163
  ATD27826129-120

SEQ ID NO: 994 - protein, 40 aa, Unknown; identical to SEQ ID NO: 163
  AWK28549129-120

SEQ ID NO: 995 - protein, 40 aa, Unknown; identical to SEQ ID NO: 163
  QHA22490129-120

SEQ ID NO: 996 - protein, 40 aa, Unknown; identical to SEQ ID NO: 163
  QGF31054129-12012

SEQ ID NO: 997 - protein, 40 aa, Unknown; identical to SEQ ID NO: 163
  APF48513129-12012

SEQ ID NO: 998 - protein, 40 aa, Unknown; identical to SEQ ID NO: 163
  AYC05819129-120

SEQ ID NO: 999 - protein, 40 aa, Unknown; identical to SEQ ID NO: 161
  AXM76265129-120

SEQ ID NO: 1000 - protein, 40 aa, Unknown; identical to SEQ ID NO: 161
  AUB88429i29-12012

SEQ ID NO: 1001 - protein, 40 aa, Unknown; identical to SEQ ID NO: 161
  AUB95307129-12012

SEQ ID NO: 1002 - protein, 40 aa, Unknown; identical to SEQ ID NO: 161
  AXM57942129-120

SEQ ID NO: 1003 - protein, 40 aa, Unknown; identical to SEQ ID NO: 161
  ASU21788129-12012

SEQ ID NO: 1004 - protein, 40 aa, Unknown; identical to SEQ ID NO: 161
  AXM62067129-120

SEQ ID NO: 1005 - protein, 40 aa, Unknown; identical to SEQ ID NO: 161
  AXM73819129-120

SEQ ID NO: 1006 - protein, 40 aa, Unknown; identical to SEQ ID NO: 161
  AUB98725129-12012

SEQ ID NO: 1007 - protein, 40 aa, Unknown; identical to SEQ ID NO: 161
  AQP33203129-12012

SEQ ID NO: 1008 - protein, 40 aa, Unknown; identical to SEQ ID NO: 161
  ASG06894129-120

SEQ ID NO: 1009 - protein, 40 aa, Unknown; identical to SEQ ID NO: 161
  AXM64572 I 29-120

SEQ ID NO: 1010 - protein, 40 aa, Unknown; identical to SEQ ID NO: 161
  AQM20027129-120

SEQ ID NO: 1011 - protein, 40 aa, Unknown; identical to SEQ ID NO: 161
  AXM79562129-120

SEQ ID NO: 1012 - protein, 40 aa, Unknown; identical to SEQ ID NO: 161
  AXM48785 i 29-120

SEQ ID NO: 1013 - protein, 40 aa, Unknown; identical to SEQ ID NO: 161
  AXM86171129-12012

SEQ ID NO: 1014 - protein, 40 aa, Unknown; identical to SEQ ID NO: 161
  AUB91870129-120

SEQ ID NO: 1015 - protein, 40 aa, Unknown; identical to SEQ ID NO: 161
  AQP36582i29-120

SEQ ID NO: 1016 - protein, 40 aa, Unknown; identical to SEQ ID NO: 161
  AXM55519129-12012

SEQ ID NO: 1017 - protein, 40 aa, Unknown; identical to SEQ ID NO: 161
  AXM82871129-120

SEQ ID NO: 1018 - protein, 40 aa, Unknown; identical to SEQ ID NO: 161
  AXM52183129-12012

SEQ ID NO: 1019 - protein, 40 aa, Unknown; identical to SEQ ID NO: 160
  AS028701129-120

SEQ ID NO: 1020 - protein, 40 aa, Unknown
  SYZ81941129-120
YNRLAVFNSYTGNEDLKNVKAENGAYLDFSKPRSMRVLAS

SEQ ID NO: 1021 - protein, 40 aa, Unknown; identical to SEQ ID NO: 159
  AOW83123i29-12012

SEQ ID NO: 1022 - protein, 40 aa, Unknown
  AXN33534129-120
YNRLAVFDSYTSNEQLKNVKAYNGRYLDFSKPRSMRVLAS

SEQ ID NO: 1023 - protein, 40 aa, Unknown; identical to SEQ ID NO: 1022
  QOU32034129-120

SEQ ID NO: 1024 - protein, 40 aa, Unknown; identical to SEQ ID NO: 1022
  AIS56693129-12012

SEQ ID NO: 1025 - protein, 40 aa, Unknown; identical to SEQ ID NO: 1022
  QGN72165129-120

SEQ ID NO: 1026 - protein, 40 aa, Unknown; identical to SEQ ID NO: 1022
  QGM36824129-120

SEQ ID NO: 1027 - protein, 40 aa, Unknown; identical to SEQ ID NO: 1022
  AIW21849129-12012

SEQ ID NO: 1028 - protein, 40 aa, Unknown; identical to SEQ ID NO: 1022
  ANW26299129-120

SEQ ID NO: 1029 - protein, 40 aa, Unknown; identical to SEQ ID NO: 1022
  QFT38638129-120

SEQ ID NO: 1030 - protein, 40 aa, Unknown; identical to SEQ ID NO: 1022
  QIJ86227129-12012

SEQ ID NO: 1031 - protein, 40 aa, Unknown
  AMG03985129-120
YNRLAVFGGQTKNEQLRAVTAYNGEVLDFSKPRSMRVLPY

SEQ ID NO: 1032 - protein, 40 aa, Unknown; identical to SEQ ID NO: 166
  AQM30209126-11812

SEQ ID NO: 1033 - protein, 40 aa, Unknown; identical to SEQ ID NO: 166
  AQL78381126-118

SEQ ID NO: 1034 - protein, 40 aa, Unknown; identical to SEQ ID NO: 166
  CDQ49722126-11812

SEQ ID NO: 1035 - protein, 40 aa, Unknown; identical to SEQ ID NO: 166
  ARV28307126-11812

SEQ ID NO: 1036 - protein, 40 aa, Unknown; identical to SEQ ID NO: 166
  AQM63381 i 26-118

SEQ ID NO: 1037 - protein, 40 aa, Unknown; identical to SEQ ID NO: 166
  AQM23414126-11812

SEQ ID NO: 1038 - protein, 40 aa, Unknown; identical to SEQ ID NO: 166
  ASF91340126-11812

SEQ ID NO: 1039 - protein, 40 aa, Unknown; identical to SEQ ID NO: 166
  AXN14636126-11812

SEQ ID NO: 1040 - protein, 40 aa, Unknown; identical to SEQ ID NO: 166
  AQM34697126-118

SEQ ID NO: 1041 - protein, 40 aa, Unknown; identical to SEQ ID NO: 166
  AQL85290126-118

SEQ ID NO: 1042 - protein, 40 aa, Unknown; identical to SEQ ID NO: 166
  AQM26877126-11812

SEQ ID NO: 1043 - protein, 40 aa, Unknown; identical to SEQ ID NO: 166
  AQM06434126-118

SEQ ID NO: 1044 - protein, 40 aa, Unknown; identical to SEQ ID NO: 166
  AQL99395126-118

SEQ ID NO: 1045 - protein, 40 aa, Unknown; identical to SEQ ID NO: 166
  AQM02921126-11812

SEQ ID NO: 1046 - protein, 40 aa, Unknown; identical to SEQ ID NO: 166
  ANJ22413126-11812

SEQ ID NO: 1047 - protein, 40 aa, Unknown; identical to SEQ ID NO: 166
  AQL88731126-ll8

SEQ ID NO: 1048 - protein, 40 aa, Unknown; identical to SEQ ID NO: 166
  AQL74945126-118

SEQ ID NO: 1049 - protein, 40 aa, Unknown; identical to SEQ ID NO: 166
  ASF99372126-118

SEQ ID NO: 1050 - protein, 40 aa, Unknown; identical to SEQ ID NO: 166
  AQL92259126-11812

SEQ ID NO: 1051 - protein, 40 aa, Unknown; identical to SEQ ID NO: 166
  AQL71490126-118

SEQ ID NO: 1052 - protein, 40 aa, Unknown; identical to SEQ ID NO: 166
  AGU58153 91-183 2

SEQ ID NO: 1053 - protein, 40 aa, Unknown; identical to SEQ ID NO: 166
  AEH33737 I 91-183

SEQ ID NO: 1054 - protein, 40 aa, Unknown; identical to SEQ ID NO: 166
  AVT686201 26-118 2

SEQ ID NO: 1055 - protein, 40 aa, Unknown; identical to SEQ ID NO: 166
  AQL81770126-118

SEQ ID NO: 1056 - protein, 40 aa, Unknown; identical to SEQ ID NO: 166
  AQM10034126-118 2

SEQ ID NO: 1057 - protein, 40 aa, Unknown; identical to SEQ ID NO: 166
  AQL68008 26-1181 2

SEQ ID NO: 1058 - protein, 40 aa, Unknown; identical to SEQ ID NO: 166
  ASG03140126-118

SEQ ID NO: 1059 - protein, 40 aa, Unknown; identical to SEQ ID NO: 166
  ATC57038126-118

SEQ ID NO: 1060 - protein, 40 aa, Unknown; identical to SEQ ID NO: 166
  AXN11232 I 26-118

SEQ ID NO: 1061 - protein, 40 aa, Unknown; identical to SEQ ID NO: 166
  AXN18035 26-118 2

SEQ ID NO: 1062 - protein, 40 aa, Unknown; identical to SEQ ID NO: 166
  AQL61174126-11812

SEQ ID NO: 1063 - protein, 40 aa, Unknown; identical to SEQ ID NO: 166
  AQL61174 26-118 2

SEQ ID NO: 1064 - protein, 40 aa, Unknown; identical to SEQ ID NO: 166
  AQL95928 26-118

SEQ ID NO: 1065 - protein, 40 aa, Unknown; identical to SEQ ID NO: 166
  AXN07827 26-118 2

SEQ ID NO: 1066 - protein, 41 aa, Unknown
  AZS25716 31-123
YNRLAMFDGYTDGNDELKNVKAYNGQILDFSHPRSMRVLAS

SEQ ID NO: 1067 - protein, 41 aa, Unknown; identical to SEQ ID NO: 1066
  AXN04429 31-123 2

SEQ ID NO: 1068 - protein, 41 aa, Unknown; identical to SEQ ID NO: 1066
  AQM13257 31-123

SEQ ID NO: 1069 - protein, 41 aa, Unknown; identical to SEQ ID NO: 1066
  AQM16560 31-123 2

SEQ ID NO: 1070 - protein, 39 aa, Unknown
  AIW14640 28-118
YNRLAVFQGFTPNQELESVTAYNGKIIDFSAPRSMRVVV

SEQ ID NO: 1071 - protein, 38 aa, Unknown
  ASD69510 129-219
YNRIATFTGYKSNSQLINVWARNGEALNFSTPRSMSVV

SEQ ID NO: 1072 - protein, 38 aa, Unknown
  ATD09504 129-219 3
YNRLATFTGYTKNGRLMNVQARNGEMLNFSTPRSMSVI

SEQ ID NO: 1073 - protein, 43 aa, Unknown
  ASD69510 225-320 3
YNRIATFTGNVSNKMLEANLANNGEYLDFSSRPRSMKVISIAP

SEQ ID NO: 1074 - protein, 39 aa, Unknown; identical to SEQ ID NO: 150
  ATD09504 226-317

SEQ ID NO: 1075 - protein, 37 aa, Unknown
  QD083225 324-413 4
YNRLGFFTKDRDNADLINVLAFNGEYLDFSEPHSMRV

SEQ ID NO: 1076 - protein, 39 aa, Unknown
  AFJ85834 386- 478 2
FNRVATFTGLTQNWELKKAKAWNGEDLDFSRPKSMRVQQ

SEQ ID NO: 1077 - protein, 39 aa, Unknown; identical to SEQ ID NO: 1076
  AVR17394 386-478 2

SEQ ID NO: 1078 - protein, 39 aa, Unknown; identical to SEQ ID NO: 1076
  AB054600 373-465

SEQ ID NO: 1079 - protein, 39 aa, Unknown; identical to SEQ ID NO: 1076
  AJY05761 386-478 2

SEQ ID NO: 1080 - protein, 39 aa, Unknown; identical to SEQ ID NO: 1076
  QTK83228 386-478 2

SEQ ID NO: 1081 - protein, 40 aa, Unknown; identical to SEQ ID NO: 139
  QLI66334 374-466

SEQ ID NO: 1082 - protein, 38 aa, Unknown; identical to SEQ ID NO: 123
  AJY65983 420-510

SEQ ID NO: 1083 - protein, 38 aa, Unknown; identical to SEQ ID NO: 123
  ACR29010 420-510

SEQ ID NO: 1084 - protein, 38 aa, Unknown; identical to SEQ ID NO: 123
  QHE09189 420-510

SEQ ID NO: 1085 - protein, 38 aa, Unknown; identical to SEQ ID NO: 123
  QKM54464 420-510

SEQ ID NO: 1086 - protein, 38 aa, Unknown; identical to SEQ ID NO: 123
  QKM47046 420-510

SEQ ID NO: 1087 - protein, 38 aa, Unknown; identical to SEQ ID NO: 123
  QTP32769 420-510

SEQ ID NO: 1088 - protein, 40 aa, Unknown; identical to SEQ ID NO: 124
  AJK48750 422-514

SEQ ID NO: 1089 - protein, 38 aa, Unknown; identical to SEQ ID NO: 125
  ALK32990 422-512 2

SEQ ID NO: 1090 - protein, 38 aa, Unknown
  ATY65184 281-371
RGRVARLVGSVENEALRAVEADSGERLDVSRPRSMRVV

SEQ ID NO: 1091 - protein, 38 aa, Unknown; identical to SEQ ID NO: 119
  QD083225 132-221

SEQ ID NO: 1092 - protein, 38 aa, Unknown; identical to SEQ ID NO: 121
  QD083225 228-317 3

SEQ ID NO: 1093 - protein, 38 aa, Unknown; identical to SEQ ID NO: 119
  QD083225 36-125 2

SEQ ID NO: 1094 - protein, 38 aa, Unknown; identical to SEQ ID NO: 122
  ATY65184 377-465 2

SEQ ID NO: 1095 - protein, 38 aa, Unknown; identical to SEQ ID NO: 118
  AJK48750 320-416 2

SEQ ID NO: 1096 - protein, 38 aa, Unknown; identical to SEQ ID NO: 118
  ALK32990 320-416

SEQ ID NO: 1097 - protein, 146 aa, Unknown
  MUC1 TR reporter undigested
DELYKDIGGLNGLAPDTRAPGSTAPPAHGVTSAPDTRAPGSTAPPAHGVTSAPDTRAPGSTAPPAHGVTSAPDTRAPGSTAPPAHGVTSAPDTRAPGSTAPPAHGVTSAPDTRAPGSTAPPAHGVTSAPDTRAPGSTAPPAHGVTS

SEQ ID NO: 1098 - protein, 146 aa, Unknown; identical to SEQ ID NO: 1097
  MUC1 TR reporter LysC-digested

SEQ ID NO: 1099 - protein, 142 aa, Unknown
  MUC 1 TR reporter Asp-N digested
KDIGGLNGLAPDTRAPGSTAPPAHGVTSAPDTRAPGSTAPPAHGVTSAPDTRAPGSTAPPAHGVTSAPDTRAPGSTAPPAHGVTSAPDTRAPGSTAPPAHGVTSAPDTRAPGSTAPPAHGVTSAPDTRAPGSTAPPAHGVTS

SEQ ID NO: 1100 - protein, 53 aa, Unknown
  ALK32990 Burkholderia
LGCIVSLDSAQKYCLPAGQPAVGQLPAWIKKGQAVFVADPGVAVRLSDRANFA

SEQ ID NO: 1101 - protein, 53 aa, Unknown
  QLI663341Metarhizium
VGGITSLTTSASYCLPAEQQSESSLPSWIYAHDVQVEAAPGTAVILSDSDNLP

SEQ ID NO: 1102 - protein, 53 aa, Unknown; identical to SEQ ID NO: 376
  QLI663341Metarhizium

SEQ ID NO: 1103 - protein, 53 aa, Unknown
  AVR173941Burkholderia
AGCIVSLQTAARYCLPVGQRSGYALPSWIYAHDVFVDAAPGTAVMLSDWDNLS

SEQ ID NO: 1104 - protein, 53 aa, Unknown; identical to SEQ ID NO: 371
  AFJ858341Burkholderia
